United States Patent Application Publication US 2025/0205292 A1 - sequence listing, part 3

SEQ ID NO: 5 - DNA, 1959614 bp, Lactobacillus gasseri
  source 1..1959614: mol_type = genomic DNA
ttgtttgatttagataaattttggcaatttttcaatgctgagatgaaaaaaagctacagcaccgttgcctataacgcttggtttaaaaatactaaacctatttcctttaataaaaagacaaaagaaatgataattgctgttgaatctccagttgcaaaagggtattgggaaaagaacttggcttctcaactgattcaagaggcgtatgcttatgcagacatggaaattcaaccaaaattcgaagtggcaggtaaagaaggacctgaacgtctagttacgccaaaaccaagaattaaaactaatcaagaaatattagaggatcgccgtgacgaatttgctcaagatcttcaattaaacagtaagtacacttttgatacctttgttcagggtgaaggaaataagctagcagccggagccgctttagcagttgccgataacccaggaagtttttataatcctttatttatctttggtggtgtgggtttaggtaagacgcacttaatgcaagctatcggccatcaaatgctagccgaaaaaccccatgcaaaagtggtctacattcaaagtgagacttttgtaaatgactttattaattcgataaaaaacaaaactcaagctgaatttcgtaataaatatcgaaattgtgatctgctattagtagatgatattcaattcttctctaaaaaagaggggattcaagaggagtttttccatacttttgaaactctttataatgatcaaaaacagattgttatgactagtgatcgtctgccaactgaaattcctgaattatcagaacgattggtttctcgattcgcctggggcttacaagttgaaattacgccacctgatttagaaactagaattgcaattttacgtaaaaaagctgaaacagatggtttggcaattgatggcagtacccttgactatattgcttcgcaagttgataccaatattcgagaactcgaaggcgctttagttaaagttcaagcccatgcaacaattgaacgtgaagatattaacgttgatttagcaaaagaagctttagcagacctaaaacttgttcaaaaaaatagaggacttcaaatctcaaaaatccaagaagttgtcgcaaattactttcaaacttcaactacagaactaaagggaaagaaacgggtaaaacaaattgttgtcccgcggcaaattgcgatgtatttgtcacgtgagttaacagattccagcttacctaaaattggacaagagtttggtggcaaagatcataccacggttatgcatgcctgcgataaaatttctcgtgccttaaaaaccgatgccgaaattaaagcagctgtgtatgatttaaaagcaatgcttgaacactaaaagttaataacatgtggataagttcttcttttgtccacatccattaaacagacaaaagtccgttttattcaggtgtttgactactttcccacagattccactggccctactactacttctaagtatttaaatatataattaaataaataagacaaagtacatataacttcacaggaggtaaacgatgcagtttacaattaatcgtaatttattcctcgaaaacctaaataatgtaatgcgtgcaatttcttcacgtgcaactattccaattttaagtggtataaaacttaaccttactgatgagatgctaactttaaccggtagtgacactgacatttcgatcgaaattcagattcctgtaaacgatgatctagttgttcaatctacaggttcgattgttttacctgcacgcttttttagtgagatcgttaaaaaattacctggtaaagacttttcatttgaagtaagagaaagcttccagactaaaattgtttctgaaaatactgaatttatgatcaatggcttggatgcaaataactatcctcatctaccagaaatttctactgatgcctcatttaagatttcaggtaaaacttttagagaaattattaatgaaactgtttttgctgttgctactcaagaaagtcgtcctactttaacaggtgttaatttcatttttaataactcatcaattaaggcagttgctaccgacagtcaccgtttatcacagcgtcaaatttctttagaaaacggcccacaaactagtactgacttaataattccaggaaagagtttagtagaattagctagaattattggtgaaaacgatcctgaaattacagtaaatccaggtgagaaccaagttttatttgaagtcggaaatattgcattctattcccgtttgcttgatggtcaatatccagatactgatcgtttaattccaactgaatctactacttctgttgaatttgaactgccagttttagctaggtctctagaacgtgcaagtcttcttacgcatgaaagtcgaaataacgtagtaaaaatgactcttgatgttcaaaatcaattagttaagcttcaaggtgattctccagagataggtaatgtggaagaagaaattagttttaagaagcttgaaggcgaaggtttgacaatttcatttaaccctgactatttaagagaggctttgcgcgcatcaattactgattccattattatgaactttacgcagccattgagaccatttatagttgtacctgcaaagcaggatgtcaactttacgcaactgattactccagtgagaacattttaaatgcctgaaaaagagctactttggtagctctttttttcttgttgtacttaaaagctaaatttagcctgattaaacgaatttttctctagttaagtatagtcatattaaattaggagaaaatggcttaaaaaaggctataatgcctcacaaaattgaatttcacataaaaaaacggtataataaccaggtatgacaaggtaaatggggtgatattatcaaaaaattcacaattaagggagaatatattacgcttactcaatttttaaaagaagaaagcgtgatttcttctggtggtcaagctaaatggtatctaaaagaaaatcctgttaagttaaatggcgaacttgaagatcgtcgcggaaagaaaatacatgcaggcgatgtattgaacttagctggagaagagtatgaatttgtttcagagtagccaatgtatctcgcaaactttgaattgaaagactttaggaattttaaagaattaaaaacagattttgatcctcatgtaaatatttttattggtccgaatgcccaaggaaaaactaatttacttgaggcaatttattttttagccctaacacgatcccatcgaactaatagcgataaagaattaattcgctttggcagtaaatttgccggtttacaaggtcgagttcataaaagccaactgcaagtagagcttaaattacgtttaacagctaatggaaaaaaggcttgggtaaatcgcttggagcaaaagaagctttctgcttatgttgggcaaatgaatgcaattttgttttctccagaagatttagccctagttaagggagcaccatctgttagacggagatttatggatttagagtttgggcagattaattcagaatatctatatttttcaagtcagtatcgtcaggtactgcaacagagaaacaattatttaaagcaactaagcatcaaaaaagcaaatgatcaagtttttttagatgtcttatctgatcagctggcaggaattgcagcagagataatatcgcgaagaataaaatacatcaaaaaactcaattcctacgctaaagctgctcatagcgagattagtggtcaagctgaaaaattgcagattttttaccgtccatcagttaaggaaattatcccagaggataatgtagagaccatttatcgaaaagttattactagttataagaaaaatcgtcctaatgaaattcgaaagggcactactctaagtggcccgcatcgagatgacttggagtttttaattaatgaaaaaaatgcccatgattttgcatctcaaggacagcaacggacgatttctctaagcgtcaagttagccgagattcaattagtacatgaattgacgcaagaatatccaattctgttattagatgatgtgatgagtgagttagatcatcgaagacagagccgtttattgaactatattcatggcaaaacgcaaacatttataacaacgacagatttagaaggtatttcttgggaaatcgtgaaggaacctaaggtttatcacatttctgctggaacgatcagtgcaaaggagagttaaatggcagaagataagagcaaggcagcattaaataaagctaaagactttgaaaaacgtgctgatacttacaacgcaagtcaaattcaagttttaggtggacttgaagcagttagaaaacgcccaggtatgtatattggctcaactagtagccaaggtttacaccaccttgtttgggaaattattgataatagtattgatgaacgattagctggttttgcaaccaaaattgaaattactgttaatgaagatggcagtgtaaccgttcaagacgatggacgtggtatccctgtcgatattcaagcaaaaaccggtcgtccagccttagaaactgtatttactgttttgcatgccggtggtaaattcggcggtggcggatacaaggtatctggtggtcttcacggtgttggtgcttctgtagtaaatgctctttcaactaagcttgatgttacagttatgagagatggaaagaagtatgcaatttcctttgatcatggccgtgtcgtaggagaaatgaaacaaattggaacagttcctcttgaagaacatggaacaattgttcatttttaccctgatccagatatttttactgaaactacaacttttgacgacaaaatcttaaagaacagaattcgtgaacttgctttcttaaacaaaggcttaaagttgacctttactgataaacgtaaagaaagtgctgaaactgatgtctaccactttgagggcggtatcaaggaatacgttgcctttttaaataagggccaagaagtcctatttgatgaaccaatttatgttgaaggtaattacgaaggaattgatgttgaagttgccttgcaatataccaatggttataagacaactttaatgacttttgctaacaacattcacacctacgaaggcggaatgcacgaagctggatttaagacagctttaactcgtgtagttaatgattatgctcataaggctaagatcctaaaggacaaggacgataacttatctggtgaggatattcgtgaaggaattacagctgttgtttctgttaagcaccctaaccctcaattcgaaggtcagacgaagacaaaattaggaaactctgatgcaagaactgcagtggatcgggcattttcagaaacatttagccgcttcttaatggaaaatccttctgttggtcgtaagattgttgaaaagggtcaacttgctgaaagagcgagaactgctgctaaacgagctcgtgaagttacacgtaagaagtcaggtcttgaaattgctaacttgccaggaaaattagccgacaacactagtaatgatccaagtatttctgaattattcattgtcgagggtaactcagccggtggatcagcaaaacaaggacgttcacgtttaactcaggctattttgccaattagaggtaaaattttgaacgttgaaaaggcttcaatggatcgaattcttgcaaatcaagaaattagatcgctctttacagctttaggtactggatttggtgctgattttgacgtgtcaaaagcaagatatcacaagttaattattatgacagatgccgatgttgacggtgctcacattagaactttgcttttgactctcttctacaattacatgcgtccaatgattgaaaaaggctatgtttatatcgctcgtccacctctataccaagttcgtcaaggtaagatagagaagtatttagatacagatgaagagttacatgattatctaggtacgcttcagccaagccctaagccggttgttcaacgttataagggactaggagaaatggatccagaacagctatgggaaacgactatgaacccagaaaatcgtcgtttagatagagtaagtcctgaatacgctgaagacgctgataaggtctttgatcttttgatggggaatgaagtaggtccaagacgagaatttattgaaaagaacgctaaatacgttgagaatttagatgcttaggaggctttagatggctaacgaaaatcaacctcaagatcacagaatacgtaatgttgatttgacccatacgatgcgtagctctttcttagattatgctatgtcagttattgtggctcgtgccttacctgacgttcgggatggtctaaagcctgtacaacgtcgtattctttacggaatgcatgaactaggagttacaccagataaacagtacaaaaagagtgccagaattgttggagaagttatgggtaagtttcacccacatggtgactcctcaatttacttagctatggctcacatggctcaagacttttcatatcgttatatgctagttgatggacacggaaactttggttctgtcgatggggatgaaccagccgcaatgcgttataccgaggcaaaaatgagcaaaattgcggttgaaatgcttcgcgatatcaataaagaaacgattgactggcaacgtaactatgatgatacggaaaatgagccggtagttttacctgccagaattcctaacttacttgtaaatggtgctagcggtattgctgttggtatgacgactaatattccaccacataatttggcggaagtaattagtgggatccatatgttgatggataatccagatgttactaccaaagacttaatgaaggtcattcctggtcctgattttccaactggcggtattgtaatgggacgtggcggcatttaccgcgcatatgaaacaggtaaaggtaatatcgttgttcgtgcaaagattaatatcgaaacagaaaagaatggccgtgaacgaatcgtagttagtgaattaccatacttagtaaataaggctgaattagttaagaaaattgcagatttagctcgtgaaaaaataattgatggtattactggagttcgtgatgaatcagaccagactggtatgagaattacgattgatattcgccgggatgcaagtgctagcgtggttttgaataacttatttaaagaaacccaaatgcaggcaaacttcggtatgaatatggttgcgattgttaacggcgctccacacttcttaactttgaagcaaatgcttgaatactatcttcaccatcaagaagatgttattactcgcagaactaagtttgaattaaagaaggctgaagctagagcacatattttagctggattgagaattgcgctagatcatattgatgaaatcattaagattattcgtggatcccaaaatagcgatattgctaaagcacaattgattcaaaactttggcttagatgatcgtcaatctcaagctattttggatatgcgtctggttcgtttaacaggtttagagcgagacaagattgaagctgaatatcaagatttacaagcaaaaattgcagattacaaagatattctcgctaagccagaacgaatcgatgaaattatctacaatgaattgcttgatattcaaaagcgttttggtgatgatagacgaactaagattgcggaaggcgaagcagtttcaattgaagatgaagatttaattgaacaaaaagatgtattgctaactctcactcacaatggctacattaagcggatgccagctgatgaatttaaagtacaaaaccgtggtggacgcggaataaagggaatgggagtacaagatgatgactttatcaatcacttgatcttctcaagtacccatgactttttgttattctttactaacttaggtaaggtttactcaaagaaggcttatgaaattccagaatttggtagaaacgctaaaggattgccaatcgttaacttgctagagctcgataagggtgaaaagattcaagcggtaattaatgttccggaaggcgcagatgataactatctcttctttgttactaagatgggaacagtcaagagaacaaaagttagtgaatttcaaaatatccgtcgtagtggtttgattgccttgactcttcgcgatggggatgagttaaataacgttttaactactgatggtaagcaaaatatccttattggaactcatttaggctatgcggttacctttaatgaaaatgatgttcgctcaatgggtagaactgcagcaggtgtacgcggaattaatctaagagacaacgattacgtagtcggatctgatattttagaacctgattcagaagtattagtaatttctgaaaaaggatacggaaagcggaccgcagcttctgaatatccagttaagggacgtggtggtaaaggaattaaaactgccaacattactgaaaagaatggtcctttagcaggtgtaacagtagttaatggtgatgaagatatcatgttaatcactagtgctggcgttatgattcgttttgacgttgatgacgtttctcaaactggtcgagctactttaggtgtacgtttaatcaaggttgatgatggtgctcaagttgcaagtattactgcagtaccgaaggctaatgatgaagacgaagaagcaactgatgaaaaagaaccagtagaagaaaattaataaataaaaaaattaccaaatttttgcgtaataataattgagtaatgtaactcaggatcgcgtgaaaaatatttggtaatttttttgtttctgtgataaaatcaaacattgtgagtaatattattcattactccttgttcttgattttaacaagaaccatttagtccaagaggaggtgcaattattatggcaaaaactaagtacgaagttacttacatcatcaagcctgatattgacgaagattcaaagaaagcattgatcgatcgcttcgataaagttgttactgacaacggtgctgaagaacttgaatctaaagattggggtaagagacgttttgcatacgaaattgaaaaataccgtgaaggtacttatcacattatgactttcgttgcagaaaactctgaaccagttgatgaatttggtcgtctttctcgtattgataaccaagttttacgttcaatgactgtaaaattagataaataatttgttttcgtgaattaggaaggggacaaaagtatgattaataatgttgtacttgttggccgtttaacacgtgatcctgatttacgtacaaccgggagtggaatctcagttgctacgtttactctagctgttgaccgtcaatacaccaatagtcaaggtgaacgtggtgctgatttcgtcagctgtgtaatttggcgtaaagctgcagagaattttgctaactttacttccaagggttcactagttggtattcaaggtcggattcaaactagaacgtatgatgataaagatggtaagagagtctacgtgactgaagtcatcgttgataatttctctttactagaatcacgtcgcgaccgtgaaaatcgtcagactaatggtggtaattttgctccgcaaggaggaaatgctccaagtaccaataactttggtggatcaagtgcaccaagcactaataatgctcctgctggtggagaaagcaataaaccgcaagatccatttgcagattcaggtagcactattgatatctcggatgatgatctcccattttaaatttaattagaaaggatctttgatatggctcaacaaagaagaggtggccgtcgtcgtcgtaaggttgacttcattgcagctaaccacattgactacatcgactacaaggatgttgatttgttgaaacgttttatctctgaaagaggtaagatcttaccacgtcgtgtcactggcactagcgcaaagaatcaacgtaagttgactgttgctattaagagagctcgtgttatgggcttattgccatttgtcgcagaagactaataaaacagatcaaaaataataaaagagtagcatatgctactctttttattttattttttgcggtattataaaagaagtaaacggagggattgtcatgattattaagcaaaaattagccggaaatattgattttgactataaatggtacgatatttataactgtgatgatcatgatataagattattgaaggatgactttgatttaacttcagaaattatttcttatatcaccgaccttcacgagcgtccccactttgatcatgactacattaccaatagtgatttgttagtttatgatgtgccagtttggccaacagcagatgcagaccatttcactactttaccaattaagtttttgatggttggacatactctttttacagttcattctcctgacacaacttatatgattgaagaatttaggcagaagccagatgaacatattcatagtgaaaaagaactgatttttgcaattttatttgcagttactaaatattttcaaagagccttgagtcagctgaatagtcagagactggttttagataatcacttaagtgagaggattcacaataaagacttgcaagagttatcacaagttgaaaaaagtttagtttatttgtctagctcaattaggactaatctaatgatgcttgagagcttaaaaaataaaaaattaggtcttcatatgaatgcgtctgaagaagaaatgtgtgatgacattattattgaagttcagcagtcctcgcaaatgatcaaaatttatagcgaagtgactgaagaaatatctaaaacatccaataatattttgaataataacttgaacaatacgatgcagtttttgactgtctggtcacttcttttaacaattccaacgattgtaacaggattttttggaatgaatgtggacttacctatttttcataatccatttgattgggtaataattactgttggttcgattatcgtaatggcaattttactttggcatttacgtcgacacaatatgctataatgcttgcttagcttagatgatgagcaagcattttttgatgtataatataaaatgatgtagtatatgttttttatgatattaatgctataacaggaaggaatttcaatgaaaggctttttacgcaaattagaattgcctgaatttgttaaagatacgcgtttaacagcatcattgattattgtcctagtcttatccttattgggagctattattgggatgctaattagtccgttatttggactagcaatggtgctactgtttatcttgacggttatttttgcagtatatggcatttatgttctagctggtaatacaaacaactatgctgctaatctttcatatcgtatcaagcgcggtgaacaagaggcaatgatcaaaatgccacttggaattatgctttacgataaggaccgacagattcaatggattaatccatatctacagatgtatctgcatgataaagatattattggctcttcgatctcttcagttgataaagaattagccaaatacattgatgatgctattaagtctaatagtaagcaaaataaaattatcaaatggggcgaccgaaagtttgagatggtcgtccaggatgatttaggtgtggtttatttacttgatattacgcgttacgcaaatattgaagaaaagtataaacaagaaagattggcaattggcttaatatttattgataactatgatgaattaagccaagcaatgggcgatcaaaacttaacaaatatgagttcatacgttcaaactaccctgagcaagtatgcaggtcaatttaattcatatcttaagcgtatagatgaagatcactttattttgttaacgcatatgcacgatttagccaagatggaagataataagttttctattttggataaggttagaactgaatcaagtagaaagaatatgccgttgaccctatcaattgggattgcttttggatctgaaagcttaaatgagattgctgaccaagcacaatctaatctagatttagccttaggacgtgggggcgaccaagttgttgtaaaacaatcaggtcatgaagcccgcttttatggtggaaaatctaatccaatggaaaaacgtacgcgagtaagagctcgaatggtttctcaagctttggtagaattatttaaaggcgttgatcacgtctttgttcaaggacatcgaaatccagacttagatgctatcggttcagcgattggaattgttaaaattgctagaattcatggtgtaaaagctagcgtcgtactagatgttgaccatgtcaattatgatgtaggacgcttaatcgctaaaatgcaagctgctggaattgataaggatgtatttatttcacctaaagatgctcttgaagcagcaacggatgagtcacttttagttttaacagatcattctaagtacagtattacttatgatcctgaactttataagcgcttaaagaatcgtttaatcattattgaccatcaccgtcggggggaagaattcccggaaaacccaatgctcgtatatattgaaccatatgcgtcctcaacgtgtgagctagtaacagaaatgattgaataccaaccgcaaggtggcgagggagtcttaactgacttagaagcttcagcaatgctagctggtattacggttgattcaaaagaattctccttgagaacagggactagaacttttgatgctgcaagttacttgcgatcaattggagcagatactcaggtcgtatctgagcttttgaaggaaaatattgataattacttgcaaagaagtcatttagtttctactattgacatgattgaaccaaatatggcgctcttaatgggagaagataataagatctatgatccaattattactgctcaggctgcagatactgctttatctcttgagcatgtagatgccagttttgcattaactagacgcagtaaagatgtaattggaatttcggcccgttcaatgggaaatgttaacgttcaagtaattatggagaagctaggtggcggtggtcacttgtctaatgcagcaactcaaattaagggcgtaacagttgaagaagctaaagataagttgcttgctgcaattaatgaatatcttaaagaaaatgaataggagtgaaattcatgaaggttatttttattaaagacatgaagggtaaaggtaagcgtggagaagttaagaacgtacccgatggctacgctcagaattttttgattaaaaatggttatgcaaaagaagctactagctccaacttaaataccttaaaacgtgttcaaaaggcagaaaaagatgcttacgaagcagaaaaagcagcagctgaggatattaagaaaaaacttgaagatgacaagactatcgtaaactttaagtctaaagctggcactgactctcgtttattcggctctatttcaagtaagaagattgttgaaggacttgaaaagcaatatggtattaaagtcgacaagcgtaaattggagcttccagagccaattaaatctttaggatacacaaatgtacctgttaagctatttaaaggcgtagaagcagtaattcgcgttcacattacggagcaagactaataatggataatgttgtttctcaacaaattccccatgatagtgaagcagagaaggcggtcctaggggccgtctttttagatccagaagccattattgatgcttcagatatattacaacctgatgatttctatgagcacgcaaatagaattgtttttcaggcgatgcttaatatttctgatcgtgaggaagtaattgacccagtaactctgcaggatgagttaaagaaaaataatcaggtagatgatattggtgggattgcatatgtaacggaattgtcaatggcaacgccaacagcagcccaccttacttattacgctaagattgtaaaacgtaaggcaatcctcagaaatctaatttctactagtcaaagaattattcaaaatgccattgagggttctgatgatgtaactgatatcttagatgacgctgaaagccaaataatgggcgtctcacaggataatgctagtggtgggtttaagtctattcatgatgtcttaaacacaactatggaggagattaactctattcctgatgatggaaatacagttacgggtttgccgtcaggattttctgaattagataagatgactactggttttcacgatgatgagttgattatcttagctgctcgtcctggtgttggtaaaactgcctttgctttaaacgtagcgcaatttgtaggcctaaaaactgataaaactgttgctatgttttcactagaaatgggagctgaacagctagttcaaagaatgctggcttcagaaggcttgattgattcacaacaccttagaactggtcaattaactgatgaagaatggcgcaaattagttgttgcggcaggttctttagacaatacaagtatctatatagatgacacgcctggaattaagatgagtgaaattcgggctaaagcacgtagattagctaaagaaaagggaaacttagggttaattgtaatcgactacttgcagttaattgaaggaccacgtagtgaatcgcgtcagcaagaagtttctgcaatttcgcggcaattaaagaagttagccaaagaactacatattccagttatcgctttatcacagctttctcgttcggttgaacaacgtcaagataagcgaccggtcttatctgatattcgtgaatccggttctattgaacaggatgctgatattgttgcctttctttatcgtgatgactattaccgcgatgaacgggatgaagatgatgagggtgaagttgaggcggaagaagataatggcgaagtagaagtaattatcgaaaagaaccgttctggtacacgcggaacagttaaattgatgttctccaagccatacaatcgtttttcaaatcttgactatactcataatgaggcttaaaaaataatttgtaagcgtttcattaattagctatactggaagagttaaaagtctatctttttaagaaataattaaatgagaaagtgtaagttaaatggtagaaggtaaatatgtaggtagtattgaagccggtggtactaaatttatcttggcagttcaagatacagaaagcggcgaagttgtagcaaagaagagaatcccaacaactgatgcaaaagaaactttagcaaaaagtgttgagttttttaaagaacatccagtatctgctttaggaatcggaacttttggtccaattgatatcaattcaaattcaagaacatttggttacatcttagatacgcctaagcgtggctggtctggaacaaatgttaaaggcacttttgaaaaagaattgggtattccagttgtaatgactaccgatgttaatgcatcttgctacggtgaatatattgcgcgtggcagagataattctaagacttacttttatgtaacaatcggaacaggaattggtgctggtgcagttcaagccgggaagtttattggtctaaataatcatccagaaatgggacatatgttagtaactccttatccaggcgataactatactggaaaatgtccattccatggtaataaatgtgttgaagggatggcagcgggtccttcactcgagggaaggaccggcattccgggtgagaaattacctagagaccataaagtatttacttatgtgtcttactatgtagcacaattattgtttaatgcttatatgactatgcgtcctgatgtaatggttgttggtggatcagttttaaatgatcaggatctggtacaagttcgcggattctttaaagagttcaacaataactatgtagcaactccagatgttgatgaattaattgttcgtccagccgttgcagataatggctctgcaactttaggtgattttgaattagctaaagaagctttaaagaataagtaattcatattaatgtttatatttaaaaaagcaacttcaatttgaagttgctttttgtttcacatgaaacatataattaactgccatcgtaggaatcatcaacaattggacctttgcttgagtcattgcctagtggctttaagtgttcattatggctaagaaaaggaaggttaatgtactgacgagcagttgctgtaatgtcagagataatctcgttagcaattaagcgtgcgtcaggatcaagggcaagataggcatggctaaattgaattgcaccacgaattttattagttgttagttgactagcctcagtaattttttgagattctaatgcagtaaagaaggctaaccaaaaagcttcgcgcttttcacgtggaatcttggtattccaagaaataaaggtacttctaataattctgcttgcgttgcttaaacctggtgccattacgaagctatttcgcgctacttcccaatgtaaaggattatgctgcttcattaagtgcttcattctacttttaactacgataacacgttctgggtggtcaagcatcattccaaaaattgatccttcaggaacataagtcatcatttttggaattacgcgtcgaaattcaatctggttatacatttctttcataaaaccaggtccatcgaaactataagccttaatgactctgtcttgaaggcgaggggaagctgcataaagtgcataagcggcgaaatttccaccttttgagtggcctactgtgtagattttcttatcagggtaagctttagccattttatctagataatctgctgctacactttgaccaaagatttctggctgataactcatatcgacgtcttcgttcagtcctaccatcgatccgtcagttccacggtaagccaccagaatagtttttgaatctaattcaattgtcattgcagtgaattggacggggagctttttttgagaaaggtgcgaccagtcgagaaagtgcatatttttatagcggtcgcttaaatttactagttctgcctctaatttatctgagtgaattaaggttttcctttgtattaagcgttttgtagctgcctcaagcgtatgacctttaacactggaatcaaaaggaaggtaagcaaaagcagcgaaaagacctgcatctaaactgttgaatggttcccgatctaatgttagatcaccccgccagcgaacataatcaagtattttacccaagataaaagtcctttcgttaacggatatagtactttcattttaatgcttttttgcttaaagataaaagaggacgcttgatgctcattagaagcaacaaaaaagaagagctaagttgctcttcttagtgattagaatattaattggatagtttcaagaggagataaaggagccttaattgtagcaacattatctgttactttaattttcactacttctttttcaacgctattatcacgtcttcgaattaaagtggctgtattagaaggtaggggtttacttaaatgccagttgatcttttggtaaccatctaagttgaaattggctagccagacaattttaacgttttcttgaatgtttaatttgacgtgaggcatattgattaaatagtcaattggttcaacgctagctagaatttgttgcattaaaccttgcttataagatgaaaattgtgattcccaaccgtgttttggatcttgatccattggtaatacaattatgtgatcatcaataacggccatgaagtttccaagtttttggtcgatcgaattataggctgaactccaaatcttaacattactatctgcttgatagtctagctgtagatagttgccagtatgttgcagcatcgtaatacgagggttcttaacaccttgaacagttgtgtcatcggcttgttcaaatgattggtagccactcttgcatggatgccatttagcactttgaatatgaagtaaattgcctatctttctgtctagtaaaacctggatactttcaccgtcaagcagaactgtgtttttagtgattagattagtgatttgttcatttgaaaggttgcgtaataattgaccagcaattgcaatggtttgattttcaattgcaaggtcatcttgaacaggaagaatagttgtcgcaaaaccgaaacttgctaataaactagcccaatttttttcatgtggaagtagctcttctggttcttttcctaaagttgtgtgagcagtataagcagagtcttgatctactaaaactttaataccacgtaatttttgcatgttaaggcgatggtcagctagggcagaagcaaaaggcttaatatcagctaacattttgtcatagccccaatcttcgtttacaccattgcccatcatgtcaaagatattaagcatgattcctttagctccgagaagtgctgtggtaataatttgaaagtcaataaaggtattagattttacttgcggtgtccacattgaattttctaattctggataaagctcagcccgaggtcctaaaaaggcagccgtagttcgactatattcttcgaatttacgaccataaattaaaggagcaacttcgttataggacggtaagtgtggacgtgctacgcgaggatgtccaggacctgcttgggcgtcaaataaactagcccagtctctgccttcaatagcatgccaatcaggaaatgaagtcatttgtcctaaatcagtattaggactaactttgtgaactgcttgttcaattaagtgctcgttttcgatcatttccttacgtgcttgatcaagataaatttttcgctcaatagtaggttcgccaggtttaagcatatttttaacaaattctgcacggctttctgctttacccaatttttcttgatatagtttcatatgatagtcgcaaaaacacattaacttcaatggagtatggttataatgccgaaaatcgtcttccatccataaacgacgtggatgaatcgaagcatattgagcatacctatcagctaaatacttacgccaagttggatctgctggacaagccatgtctttagcttgattgccattaatatcgacaaaagtattaaagccaatttcaggattaacgctaaatccgcgatcagagtgcataatagttgtccatggatttagactcgtagtaacatcaagcttagctaattgcttttgtagggggataatcgcatcaagccagacttgtgtttcttccttggttagatgactgtggtttaattcttcgccattaataataaaagccacgtcatcaattttggctttttgtacaaaatctaagagttttctatctttctcaggcgtattagtacgtggatcgaaaacataacgtaaagtataaatgtagctcataataaatcctcaatattctattcaattaatattcaaaaaaagtgtgtaacttagtatattaagttacacacatatcttagcatattttgaaaacggtttctataattttattttgctccgtgagtagaattaattcggcgaatattttggtctttttcaagagctaggatgatgtcattttcatcttttctattcttgatgacgccatctacattaacaacaatgtgttcggaagttacatcaataattttaatagaaatttgttcaacttcgtttaaagctagttcttttttcaattcattgagaacgtcgggacggttattggcttcaatttgaacgttaaagcgaacatgaagaataataaaattaataaatgtatcatcatgaaaaataatttggataatgaataaaaagactgtgctgacacttccgatgacatacattccagcacccactgccataccgatagcagcagttgcccaaacaccagctgcagtagttaaaccagaaatctgttctcgtctaactaggattgtaccggcaccaataaaggaaattccagttacaatttgagctgcaattcttgatggatcaagtgaaatatcatgtagtgataataagtcaaagaagccatatttagaaactagcataaatagagcagaggcgacggcaacaaccatgtgagttctaatgcctgcgctttttctttgagtggcacgttcatagccgattgctgttccgcaaagagcggcaactaaaattcgtagtaaccaatctaattcagttgaaagtgatgttaaacctaccataattaatcccttctatataacagatacgcttttattgtagcccagatttagtcgaatattcatttaagtaaaaagtttaaaaaatctcttgtacagaaacatataatatggttaaatacataattgtcatataaacaggctgacttagctcagttggcagagcacgtcactagtaatgatgaggtcgaaggttcgaatcctttagtcagcattttttgtgctcatatttaattaaaagctatcaaattatttcttaaaatactgatttgatagttttttctttgctttgaactagaataaaaaggtttgggagcaagcgttaagccttttttgtgtttaggtatttgaaaaggattatcttcagtattagagataatccttcttggttcgagctattatattttttgacacgttcaagatgagataaagtaattaatttattagccaataaagatattaacaattttaaagccaattgtagtactaaataattatcttttaactatttcttctaaattaattgggttatttaattgataatctgcttcaggaagttcttcatgtgctccccaattggctaaagcaaatttcactttagcggcgttagcagttaacatatcatatttggtatcacctacataaagcgtttcagtacgatctacaccaagtttacttattgcgaaatttaatggctcaggattaggtttatgattcttagtatcacttgcagtaacaattacatcgaaataatcatctagtccaaagtgaccgacttcattaatatattcttgtttagtttttgaagtaacaattcctaaagtaattcccttttgagatagagatttgatagtttcggggatattattaaataatgtatcttcatcaactcggttactagctttttcagaccaacttttagccattttattgatcaatactttattcttagtaaaatgcttaatggcatctcttccaggaattcccaatgcaaaggctaaatcgttaatattaacatttgtatttaaatattctttaataacctctttgaatgtggaaagaacaaccttttgtatatcaacaatagtgccatctacatcgaataaaattgtcttaatcataatttactccttatttataaagcggttacagcaattatatcaaaagcataattatctgaatatgaaaaaactactaatttccttaatagcaatagcgtttataattggcatcatttttaattaatacactagagaactgaaataagtttacgtaataccgtaatacgccttgttttagttttttattgctgtggttcaatacgtaattggatggtcaatgatttaactaatggagtatcagaataaagcttagtatttatagatctacctgtttgttaacaaaatatgtcatatataattgacaattctgaaataaatattatacttaaagtataaaaagtcacatatatatgacttataagaatgatagaaagaattgccatgaacagagttaaagaatatcgaaagcaaaaaggcttatcacagatggcattagctaaaaggatagatgttgctaggcaaacaataaatttaattgaaaatgataaatataatccttcattagatttatgtttgaagttagcgcatgagttagatacagatttaaatacattattctgggatggagatgtttaagaatgaaagcaaaagaaactagattcgaaaaatatatgaaattttggtacggaatttctggtccacttgatgagcagaagcgtcaagttatgaatcgaattgggaatagggcattttttattttctttttagggatggatgcagcattcttaatttctctggttttaatttctttctatggagcaaacgttgcatacatttttcttagcggtagtttttttgtaatgctaatgattgttagtttttatgtaatgtttcaatccaagaaatttaaattaacggataatgagatagaaaaaaatgaagtctctaatgctaaaaagtctgcttggataagaggaatgatgtcaggtttattttttggaattatgatgttgatcctaaattttctgactagctacggtgatggttcttggacctggattgagattccttctagtataattgggggtctattctttggtattgttatgtcattagtttgggttcacagaattaaagtagtaaaagacgaagattaaagaattagccatttttaatgctaaattgttgcattaaaaatggcttttttgttgaaagaacttcacgtagcccataaatatttgtatcatttaaatgtaatcgtttgcatgaagatagaaaagataaagaaaatgaaaacaacaaaattaggaaaaacaagtttagatattccagctctcgctttaggcgttatgcggatggggactagaactccagaagaaggagctgctgcaattaacgtggcatatgaagctggagtaaattttattgattcggcagatatttatggacgtggaaattcagaaaaagtttttggtaaggcactaaaattatctgacgttaaacgtgaagatttatttattcaatcaaagactggaattgtcgtagggccaaatggaagccatggatcgttggtttatggctcacgctatgaatttactaaagagcatattttgaatgctgttgatggtattttgaagagaatggatattgattacttagactgcctagtcttacatagaccagatgtcttgatggatctagaagtaattaaacaagcctttgatgtcttgcaagctaccggtaaagttagattctttggtgtatcaaactttaatcctgctcagtttaagatgcttcaaaatgcagtaagtcagcctttaatgtttgatcaggtgcagtttggattaatgcacacagggatgattgattttggcttgcatactaatatgactgatgatgcttctattaatcacgatggtagtttgcttgaatttctacggatgaatcacattactttgcaggcttggtcaccatttcaatatggaacattcgaaggtacatttatcaataatccggcctttcctgaattaaataagaaattgcaggaaatcggagataaatatggcgttggtaaaaatgcagttgcggcagcttggattcttagatggcctggacaggttcaagtcattatgggaactatgacaccagctcatattgtcgattctgccaagggtgcagatattgagctgactaatcaagaatggtatgatttatattttgctgcaggacacgatttaccataaaaaagttttgctttttataaaatcatctgatatactagtagacgttgtgagaaatgctgacttagctcagttggcagagcacgtcattagtaatgatgaggtcgaaggttcgaatcctttagtcagcacaagttaaaagtcctaatctgatggttagggctttttttgttactcttttaacttgatataataagatgtagaaataaattgcgaaatattagaaaaggtaaaagcagatgaagctaaatcaagataaagaaactttagatcaaatagcgccattagttgagtatgcttttttaaaaaataatgatatacgtgaggatcccaactttttaagtcgttataaccatagtatgagctttggcgaatataaagacggccatcttgctagctatattatggtaaataaatttaagagtatgatttttgctaaaaaggttaaaatgggcggagttggctatgttgcttcttatcctgaaaatcgtggtcaaggcgatattaaccgtttgatgaaggaaattatgttagaactacatgaccagaattatgcaatttctaacttagctccattttcagagactttttatcgtcgctatggctatgaaaatgctatttatgaaaaaatgtatcaaattcagccagcctacctgcgcttctttaaggctgtccaagagggaaaagtagttcgcggaagatggagtgattcatccctaaaaaacgcagtaattaagctatatcaggctaaactcaatcaagatgatcaaagaaatacagtagttcgcgcagaatggtggtgggatcgattagatacttattatcctggcagatcaatttgtgtttattttgataaaaagcagcaaccacaggggtatatgttttaccgaattgttgagcgcaattttcgagtagaagaaatgtattatcaaactccgcaagcagctaaagctttactaagcattattgcaagtcacagttcaagtgatttgaagtactatgtgaaaatgcctgaagaaagcttgttagaagaattcttcccagaacaagaaggaatcaccgttaaaatcttaccttacatgatgactagaatcattaatattaagcaagtgttggaagcatcgcctttagttaataataagaaactaactattgaagtcactaacgatgatattattgctgaaaataacggtgtctggttaattgacaatgctaacgaaccaagggtaagagaagtcgaaaccgatccagattatacagcttctctgaccaactggacgaaagttttattaggccacttaactttaaagcaggcagttcaattaggctttgttaaagaaaatcatccagttaatactgattttgttaagggcgacgtttcattttatgattacttttaattaaaaatagtttttctgttgttttacggcagtaagtctcataatcttgctatactattgattttaaatttaaaaaccaaatattatcctacttatcttttttcatgctaagctaaggtaacagataaaacacagagaggagaaattataatgaaagtaggtattattggtgcttcaggcatggcaggaagtgcaatttataagttagctagtcaaaataaggacttagaggtaactggaattgttagagatgaagataaggctaaaagagtcttaggtaaggatgctaaactcttaattggtgacgttttaacaatggatgacagtttactccaacaatttaatgtgattgttgacgcctttgggactaagcctgaaaaagcaagagatcaggtaaagcttgctactaagttatgcggtctagctaagaataaagatattagagtaatttttattttaggtgctggcagtcttagaactggaattgataatcacttagtcgttgaagatattaagaaattaacaggctctgaaaactggattaatacaccaaaagaacagttgaatgagttgaattatttaaagcaagtcgaagatgtagattggctcggaatttcaccagccttaacctttgaagcaggtccagaagctgcggggtatatgttaggtaatgatactttgctctacaacaataacaatgaatctaaagtaacttcgggcacaatggcacgcttagttgtaaatgagattgttcacccagaacaccataaagaaagaattactttagtcgatgaataaaaaataaccgctacaatgtagtgacccacaaaaattggacactttattaatattatgcaactaaggattgattccgatattgaatcggagtcagtccttttagtttactctttgttctttcgtaattatagaaatgaatataatctttaatcgcttgttctaattcattcagattggcatagtttgattctttgccataaaacatctctcttttaagtatgccaaagaagccttccataagcccatcgtctggagaacagcctttcctagacatactttgttcaatgccacgtcttgcaagttcatattgataagtcttatgttgatattgccagccacgatctgaatgaaatactaatccattcaatgaatcattaactttaaatgcatcatcaagcatagtcattacctgctgcaagttgggactacgagagatattataagcgacaatatctctcccacagccatcgataataggcgatagataaagcttttgtcctcttaagttgaattcagtaatatccgtgtaccacttcatatttggtctaatagcaaagaagttgcgtttaattaagttaggtttaattcttccttcaatttcaccctcaaagctgttgtagcgtcttctacgtttcatacgatatccaatcaaattaagtttacgcattaaacgatagactgtttttcgattgattataaagccttcactatgtaagtgatcagttattgttcgataacctggagcagtgtatctatctttaagttcaaagaatatttctttaattcgtttaattagactgtggtgccttatttcatcttgatcttcacgctttaggatatcgtaataattgcttctagataaaccaggtaaatcattatttagatcatttaaaatcgataagatagttttaacacccaacccaagttctagccttaattctctaacagcttgtgctatttctgttttggttggttttttctcttttgaaccaaggcattcaatttttttataaatgcgttctcgacagtaagctttaaattctggcgacgcaattcttcgttttctttcttcaatttctctagttctttgttcacgggttcgtcgtcctttcctcttgataacgacattatacccgttttctttataagagcgaatccaattaataagcatcccttgacttttcaagcccaattctaaagatacagagtaagcagcttcatgattgactaaaacccgattgatagcttctagtttaaattgggctgaataataagtatggggcttatctaatatatccattccatgcctatgaatgagtgaaactaagtacttaatactaactgagcctattccatactttttacttaaatatgtcgatcttttattttcaatagtccattctttataaatattcaatttatcttttttagttaatttagacatagtaaaacccccgaaatccgtgtccgaagttcggggggcactacaaaacgctcaggcgctatagcggttatttttatgtaatatttaattattagcaactaaagaacgataaaagttggctttagtttgacggtagtaaggagtaatccaaataaatccaataccgcaagtgattaaaccaagtaagccccaaccaatgaaacttaagtctagaacaaataagtccatcttatgtccatccattaacttacgactttcggtaatagcttcagttgctccaatatcagtttgaccagctgaaaacttatcttttaagatataaggtgtcatggcataggaataacctttaataaaaccaggaataataaataaaatggtccataaactaacgaataaattagtcataaatagggtaaataaactattcttaaagcgtccgttgctataagcactaaaaataccagaataccaaggctccatcttgcctgtttcaacgaaatctaagattgtgtaggcaactccccataaaattaaaccggtaattaaaccaacaataatttctgataggttataggcgggcttgtatccttgaattaagttatctttattaaagcgtagaacagtataagtgaagtcttttccagtccagatccagcggttgagatccataataactgcgttaactaaccaggcaaagatagttaggcaaatagcccagccccaattgccgcgtagttgatcttttgcagcttgtttcatttgtgcacgtgtcatagtattacttctctctaacaatatattaacttctaaccattctaatcttaccactaatctttaagtaatttgaaaaactaaaatctgccatgttctgctataatcaaaattactaacttaaatagaagaagggttgctacttgaaatataaacaattaatttttgacgttgatgatactttgatcgactttgcggctacggaagattcatctttgcatgcattatttaaatcgcacaagttgcctctttcttctgatttgcagaaacaatatcatacttataatcaagggctttggcgcaggcttgaattaggtgagattacgtatgatgagctaagtgagatgacttttcatgattttattaaagagcattttaatctagaggtagatggtaatgaatggatgaacgaataccgttcttattttggcgaagcgcaccagttgttgcctggtgtagaagacacgcttaggtttgcgaagaagcagggatataagttaactgtattaagtaacggcgaaaagtttatgcagcgtcaccgcttagagttagctggaattaaggactactttgacttaattgtaacgtctgaagaggcacattattctaagcctgatccacatgcctttgattatttctttagtagaactgaaattggtccgaatgaaaccttgttctttggggatgggttgcagtcagatattttaggtgctgaaaaatacggctttgatagtatttggtataatcatcgtcacagaaaagatactattggtcttcatcccttatttgaggtcgaaacttatcctgaatttgtaaaaataatgcaaaatgattttcaaaaagcatattaaaaggagtgcgtgaggcactccttttgtgttacatactattctttttcaaaaccaaccattaaaccgccattttcggcgtagaaactgcaaagggcaccgcattcttcgagagtaactttagcatctgggaagttatctaggataatctctttcatgcttagtgcagaaccttcattttgaacgtgatcgatttgaacacggccgcctttgtagcctgctttgaccatttcatctaagagctttcttctagctttcttagcaccgcgtgccttgcctaaaagttcaaattcacctttattgttggcagttccgataacgaaaagcttcaacaaaccagcgatttttgcgactgctggtgggatacggccattatttcctaagttagttaagtcttgcaaggcaaacattaaatcaagtttgtgttgatattcttctgtagctttaacaatttcttcaaaagacttaccagcacttgctagactggcaattttttcagctagtaatcttaattgaggaccagctgagcgagaatcacaaactaagatcttagctttaggattcttttcatgatagatttttgcggcttgggtagctgaattataactaccagaaagtgcgctagttaaagtaattacaaaaatttcatcgctgccctcaaaggcttttagccagtcatttacgttagggcaagcagaagtagatttactcttagtgtgttttagcgtatgaagaaacttatctaaatcaatatcaggcgtatccatccaaagcttgccatcaacgtgaagcgataaaggaactgtaacgtgatcaattccgtcaatttgatcagctgtgatattcgcagttgaatctgtaataatttttattggcatatagattacctcgaattaaatatattaacctatttcctttcagtctagagaagatagatagtaaagtcaaagaaaatgctagtaaaaaagacagcactgaggctgtcttgattaacgtgaaaaaactagtcccagaagaccgccaattgcgattaatgctaatagcggcaatactaggtaagaaacgaaggcaaatagcaagccaacgatgattaagaaaccaacaatttttagcatgccaattcctagtttccagaaaagccaaataatcaataaggctaataaaattgaaaacatattctaaaccttcttataaaaaattaaactatattttgatattaatcatattacgaaattgagagaaagtgtagataagtttttattaagaatatggggaaagtaaaatatactaagaaaataaataaaccgctttcatattttgcaaaaacgtgctatattaatggtgtgaaatagctcaagtagaagtcacgattaagattgttagaagttatattttttattaattaagtagacgatactctagctattgcaattcataaatataattcataagtaaaaggaagttctattttgaacttcctttttttgctgtatcgcttgctataataatactaaaaagtactatctataatttttggaaaaataaactaatgaaaaaagtaacaataggaattctagcccacgttgatgcaggcaagactactctatcagaaggcttactttatcaaagcggtacgttaagaaaactaggtgcagttgataaaggaactgcatatttagacaatgacaatttagaaaagaaacgcggaattacgatcttttctcatatggcgcgcattaaaactgaaaatagcgaattactcctcttagatactcccggccacattgactttgcccaggaaatggaagagacgcttagcgtattagactatgcaattttagttgtgtcggctagtgaaggcgtaactgcctatacacagacgctttggaacttattaaaaagtcacaagattccaacttttatttttgttaataagatggacacgttaaaggctgataaggagaaggttcttcatgacttaagtacactcgatgacagctgtgttgagtttggggatgaagattctgatttttatgaaaaaattgctacagcagatgaggcaattttagaagaatatctagaatctggtcagataaaagataaagaaatccaagatttgatctctcaaagaaaagtttttccagtttattttggtgctgccttaaaattaaaaggcgtagctgaatttttacagggactagataagtggactaagaaaatagagtattctgagaaatttgctagccgtatttttaagatttctcacgatgagaaaggcgagcgcttaacttggctaaaagttactggcggcgaattaagagcaaaaagtgagctaatgcccgatgaaaaggtaaacgaaattcgtctctataacggtaataagtatgaagtggtttcgagtgttcaagctggcgaaattgttgctgttagcggactgaaaacaacttatcctggtcagggtataggatttgaaaaggatcaaatgaactttacaatgcagccagttttaaattatgcagtgcaaactacaccggataagacgcatgcgactttagcggctctaagacagctagaagatgaaaatccgcaactgcatgttaagtgggataagcaaacagaagaaattagcattgacgtaatggggaagatccagttagaaattcttcaacagattttgcatgatcgttttaacttagaggttgaatttactcaaggcaagattctatatcaagaaagtattagaaactcagttgaaggagtaggtcattttgagcctttaagacactatgcggaagtgcacttattgctaaagcctggtaagctaggcagcggcttagtttttaaaaatgaatgcagtctagaagtcttacctaaaaaatggcaagaccaagtaatggagagtctagctaacaaagaacatctgggtgttttaaccggctcacctctaactgatgttgaaattacgctaatcggcggtcgcggtagcaatgttcatacagttggtggcgactttagagaagcgacctatcgtgcagtgcgacaaggtttaatggagttaaaagcacaaaatcaagtatctttacttgagccttggtatcaatttactttaaggattaatcaagaccaggttggtcgtgcaatcaatgatattgagaaaatgggcggaaaatttaaaatcggagaaagtgatcatgatatcgtaacgattactggtcaagcgccagtagcacagatgcaagattatgcaactgaagttaggaattactcacatggtagtggtcaattagaatgtttatttgcaggatatcaagaatgtaaaagcagtgctgaagttattgcggatgcaaattacgatccagtttctgatattaacaatacacctaattctgttttttgttctcatggcgcaggtcatactgttgtttgggatgaagtgccaagttatgcccaatatccttacttaaaatcttaagattaattaggattgactaaaaagatagacatgattattttagataattcttttttcgtaagaataaagccgaaataatggctaaggcagctccaaataagattacccataaaaagccaaattcattatctttacctggtaatccgccaacattcatcccccagatcccactaattaaagctggaattgagatgattagagcaattgaatcaagatatttcatcaaattgtttaaatggttatccatcattgctgagaaaaggccattaattgattctaaaagatcacgataaactttaatcttcttagtaatccggcgctgagaaagtagtagatcaatgataaaaattgaattggctgaatgctgctctttaagaaaatcagttagagcttcaatagaagaaacttggtcatccattgtgtgattaaaatagaccaaagtcctagttaagtcagttgcttcttttaaagatttagttttggtagtagttcttgctgcatgatctaactgatcaagttgttgctttattttatttaattcttaattaaagcaatggttttgatatagtaattgcttaattaaaagatcttcaactgataatttagcaattgccttttgatcttctaaagtaggtgctggatttttttgtagaactgagattagttgctgagaattgaagatcgcaattgtgggataaatcgcatcttcaactttagtttgcccagcgtcaaaattaaaggacacaaaaattctagcatttttaattttacatttgggcaagatattaaaatgtgatacttcagtagcagacgtttgtttagtaaagacatgcgcgtcacagccgattgttttttctatattggttaattcttcagaagtaggattaactaatatagcaagtttagctgataatagattgtctgatgttgtggatccatttttatcgtatacagtaagcataagaaaacctcctgactattgttttttagggtaaatatatcatagaaggcactataagttagatttaacgcctcgcatttattaaaaatgaaagcgatatacgtacaaaaaattaatttatgattaatgtacatagcaagttattaaggaaatgttaagcttgctattttgaagatcccagaatatctttatcgactagtgcttgatatgattaggttaatcagtcatgaggattgaagctagctagctaaaacaatcttttatgtgttttaggaaaggatacctaattatgatgaaagataaacatggaattaaagacaaagtagcaggaaaacttaaagaagtagaaggaaaagtcactggcgataaagcccgtgaattagaaggaaaagctcaacaagctaaaggaaaggtaaaatctaaggctactaaagtaaaagaagacttagaataaattactactaaattagaaataggaggcgatccccatgcttcactggatttgggttttgattgtcggaggcgtaatcgggttaattgcaggagccattactcataagggtggctcaatgaactggattgcaaatattattgctgggctagtaggctcatctctaggcgaggccttgcttggcgcctggggtccgcaagtagcgggaatggcaattgttccatcactgttaggtgctattattctagttatcttggtatcatggattatgacgatgctatttggccctagggctagcgaataaatcatattcaacacaattaaataatctctctcaaaagagcagtcttagcagactgctcttttctatagccgacgttttgatttttcatagtataatgaatgtgatataaaaatctaggtaagaaaagagataataatgcgtttaatttcatggaatattgattcgcttaatgctgctttaactagtgattcagcacgtgccaagcttacgcgcggcgttttaaatacaattaaagaaaaagatccggatattattgccattcaagaaactaagttacggtcaactggtccgactaaaaagcatcaagaaattttggctgaaatgtttcctgattatgattatgtttggcgttcttctgaagaacctgcacgaaaaggttatgctgggacaatgtttttatataaaaatactctcgctcctgaagtaactaagccagtaattgcggctccagaaccaatggatcatgaaggtcgaattctaactttagagtttgataactactacgttacccaggtttatacgccaaactctgggaatgaattgaagcgattagatgatcgtcaagtttgggatgaaaagtatacagaatatttacaaaaactagatcaaaacaaacctgtgattgctagtggtgattataacgttgctcatacgccaattgatttgaagcatccagaaagtaatcatcataacgctggttttactgatgaagagcgacaagactttgataagttgcttaagcttggttttactgatacatttagaaaagttcatggtaacgtcgaaggggtttattcttggtgggctcaaagagttaggaccagcaaggctaataattcgggctggagaattgattattacatcgtgtctaatagaattgctgatcaggtaactaagtcagaaatgcttgatactggcgagcgaaaagaccattgtccaattatgttagaaattaatttataattgtccacttgtggataaattgagaagatccaaatgatcttcttttttagtttaggatggaagtgaaagctgtggataacgttttaaaagatgcaattttgaatggcttatacaataagaatgagaataagggaaatgagtttattagtcctcaattagtaaataatgatgatcaaagtaaaatttggtttactttgcgacaagaattaatgtcatgtacctcttttacctgggcagttgcttttatttcagagaatatgctcgttccctttaagttagtaatgtcggaattagcgaaaaaaggagttaacggtaccttaattacaggaacttatcttggctttaatagtcctaaagtttttaaggaattagtgaagattcctaatttagaggtacgattaagtgaggaagctggttttcatgcaaaaggttatatttttaatcatgaagactatcagacgattttaattggaagtgcaaattttactagaagtgccttattaaaaaattgcgagtggggactaaaggtaacctcgcatgaaaacggtcagctagtagcagaagttaacgatcaaattgaaaataatttaagtaatagtttgatacttactagttcttggattaaagaatatgaacaaaattggcagccagtcaaaaaagcggcttaccttccattagggaaagccaagaaaatattgcctaaccaaatgcaaaaagcagctttagcgaatttaaatgctttagtaaaagaacaagccaaaaaagcgctagtcgtctcagcgacagggactggaaaaacatatttgggtgcttttgcagttaaggaatataagccaaaaaagtttctgtatctagttcaccgagaacaaatagctaagaaagctttagagagtttttaccgagtaattggtggcaagaaaagcgactatggtttattaactggaaataaacatgattttgataaaaagtatctttttggaacggttcaaactgtaagtcaggaacaaatactcgaacaattagatccggaagagtttgactatattttaattgatgaagctcatcgagtggcagctccaacttatcagaagattttgaatcattttgcaccgaaattcttattaggtatgacggcaacgcccgagagaatggataagcaaaatatttatgaaatatttgattatcatttagcttatgaaattagactaaaggatgccttaaatgaccaaatgcttacaccgtttcattatgtgggcgttgaagattatacagtgggaaaccatgtaattagtgaaacaagtaagttaaaagatctagtcgctagaaagcgagtagagtatgtacttaaacagcttgattactacggctattgcggagagaaagcaaagggcttagtattttgcagtcggcaagaagaagcaagagagctagcaaaattatttagtcagacagggcatccgtctcgtgcgcttactaatgaggacagtcaaaaacagcgtattgaagtaactcatcagttagaaaatggtgaattagaatacatttttaccgttgatttatttaatgaaggaattgatattccatcgcttaatcaaattgtgatgttacgaaatacccaatcaagtattgtttttattcagcaattgggtcgaggccttcgtaaatttccgggaaaagattatgtcacggtgattgatttcctgggaaattataaaaacaattatctaattccgattgctttaaatggtgataagagtcgtgacaaagatcaagcagttagagaaagcaagttaccacaagtaattgatgtttcaacgattaactttacagagattgcttctcagagaattttggtttctcttgaaaagataaagctagacagtatgcgcgaactaaggcagtcgtataaagacttgaaagaaaagattggtcgtgttccactcttatacgatttttatcaatatggtacgactgcgccaacggtttttgctaaaaatcatgctctagctcattatggtgactttttaaagaagatgggagaagaagtaaatttaggtaattatcaaaatgcagctctctcttttgtgacgaaggagttattatttggaaagagaccgcatgagttgctactcttagaaagttgtttagataaaaacatcagtagagctgattttactaaattgcttaagagcaaaaattgttatattagcgaagatgtacttaattcggttgaaaaaattctatcattaaatttttttgacgttaaacagggaaaaacaaccaagaaagagcaatacggaagttatccattaattgaaaaagaaaatggagagtatcgcttgtctagtcaactacttcaggcattaaatgataaccaccaatttaaaatgctatttgaagatgtcctaaaaacaggtttagcccttgctcgggaatataattcgcaagcgcaatttactctgtataagcaatatgatcgtaaagatgtttgtcgtctgctaaattggcctaaggatgtttcggctccaatgtatgggtatcgcgtgggagaaaaagaaacaccgatttttatcacttatcaaaaagattctgagaaaaaacgtaatgctcgctatcaaaatacgcttgaaaatggtcatagtttacggtggtatactcgtacgcctcgtcacttagattcagatgaagtaaaacgattgcttcataataaaaatatgaaattgcacttatttgtgaaacgaagtgatgcagcaggaaaagaattttattatttagggacagctgagatccagaaagactcagtcaaagaagaaaaaattggacttaagcaaaagtgtgcagttggcatgaatttggtccttaatcatcctttaaagcaatcgatttataatttgctttttagttaagaaattaaacctagtttaggataaagtatagaaattcataataattatttgatagattctaagttacaaaaatggaggaagagagaaaataagagtgaaaaataaactagtttctttacttgctttcttggtgatttttttgactggttgtactaatcaagataaaccaaatcaggcagatgcggcacctaaatactatgttgaaaggcgtcaaacacctaaaacaagcttgaatgtgataccaactctattttttcatggtggcttaagtaattataagagcgaagaaaatatggtaaaagcagctcaaaaagcaggagttaccaattcggtaattagagctgatgtagacgcaaatggtaaagtgaaattaatcggcgctatttctaagaatgctgtaaatccaattgtagaggtaaattatagcaataatgtccagctgaatttcaaagagcatggtcgctatgctagaaatgttgtgcagactttgcaaaatgaatacggaataaaaaagataaatatggttggacattccctgggaaatatttcgattatgtattacttattacaaactgctcatgatcctgagatgcccaaactaaataagcaaatttcaattggaggacattttgatggacttgattttaagcaactaccaattgcgattcgccagcctgccaatttacatgtgaatagagaaggaaagcctaataagactaattctacttatcgtgaaatgatgaaattaaggactctttatccaaataagcagactgatattttaaatattattggtaacattgggggtaattcagatggaattgtaaagaatgcttcgtcactttcgcttgaataccttgttgcgccaatggctaagacttatcaagtagtcaaaattgtcggtaaaaatgcagaacacggacaattgacttataataagcaggttgaaagaagcattatcaattttttatggctccagtgattttgagcaatcaaaaagaagatgttttgatgcatcttctttttttagactttattttcatgttgattacttttatcgaaattatgaagccacatgccccaagcggcttgaaattcaataattaatacactggcagaaataagtaccatgataattaatgcataactagccgtttcacctaattcagatgtatcaaaattgtaagtaaagagcttaattcctccatagataagtagaataacccaatatatatttgctccccaccataactttttcattgcagataccgctttcatttgctatataaagctattataccattcttatagttaattaaaagcttggtgcctagctaaagcccccttaagaagttgtataataaatagaaaatggagaggtgaagtgaatgggacaagtttgggaaaaatttaaaaagaatacaaacgtgcatcgcctggctacgctctgcttaattattctggtcttatatgcggcacgttcaatgatgaatacaatattattaacgtttatttttacgtatttaattgtgcacttaattcgttttacgcaaaagaaattgccaaacttgccttcgcaggtaattgttgtgttagcttatttattagtaattgcgatcatttatttggcgattaccatatatatgccaatattaattaaacaaattgttaaaatgagtcattctttaatggaattttatcaatctgataatatggactggttaacgcaatatttgaaccattatatcagcgatagtgaaatcacaacgcaggcaaagcatggtgtaactatcttggttcacgccttaactaatgtgggtacattaacgattgcgttctttatgtcactaattatgagctttttctatactattgaacttgattcaatgaacgaattttctcatacttttttgaatagtcgccatttatcttggctgtttaaagatattgcctactttggtaataagtttgttaatacttttggcgtggttttagaagctcaattcttcattgccttatgtaatactgcgatgacaatgatttgcttaattatcatgaaaatgccgcagattattgcgctttgtttaatggtctttattctaagtttgattccagttgctggtgtaattatttcattgattccattaagttttgtggcttattcagtaggcggaattaggtatgtaatctatatctttattgttattatgataattcatgcaattgaagcctacattttgaatcctaagttcatgtcaagtaaaacggaattaccaattttctatacctttgtggttttgcttgcaggtgagcatttccttggaacgtggggattaattgttggagtaccaatcttcactttcttgttggatatcttaggagtaaagtcagttaaaaagaaaaaaccaacaattttaaaaattgaaaacaaaaaataaaagcagctgtcaaagctgctttttgcgtattgtaaataggattgtaggtcccaaatgagaatatatgaaaaatacgagatatgaatggagtttttaattttgctattcacaatacaatattaattacgcaaaaaaatctgactttttgttgttttcttataaaaattttcaaacactaataatagcggtttcacatctttctttgttaaactgaaaatgaaagaaaaatgtgaggcaatcttatgaaaaaatacgattatataattttaggaacaggtcctgcagcatatcaatttattaagctcttagctacacaacgtaaatcaattttagtgattgaaagtggcttattcggtggaacttgtcccaatgtcggttgtgaaccaaaaatctatttagatggtgctgttcaagctgcgcttcttagcaggcaattagaaagtcatggcattgaacaggctgcgacgattaactggtcacaattaatgaaagagaagaaggaacgatttgctagttggccaagtgaaacaagaaaaaatattagcaagatctgcgatgtagtcagtgggagtgcacattttattgatcaacaaacaattgcagtaaatcaaaggtatttccagggaaataaaattattatcgcaactgggagacgaccgcatgaactatcaattccaggggctaagtttttgcatgatagttcagatgtattatctttaaataaagtttcagaacacgttacctttattggcgcgggttatgtggcgatggagttagctactttcctagcggctgcaggcagtcaagtaaccattttggttagaggaaaacatgtattaagacatttttatcaaaagtatagtgctgaactagttactagaatggtgcaacgcgggattcaatttaagtttgctactgaggcaacttgcattacacaattaagtgataaatatgttgttgaattaaatcaaggcagttcccttgtaactgattatgttgtgaatgctagtgggcgtacgtcaaatattgaaaagctcgatttatctgctgcacagattgactattcacctaagggaattaatgtggatcagcatttacaaacaagcgttaaaaatatttatgcaattggcgatgttacgagtcaggatgtacctaatttaactacggtagcagagtttcagtcgcactatcttttcaattctcttgaaaaaggtttaagtcagccaatcaattatcctgcgatcgggaccggtgtattcgcctttccgcaattggctcaagctggaattaaccctgatagtgtttctgaggataaagataattttgaaattgttgaatatgaactaagtcagagtagtttatatgctggtcaaaaagaaaaaggattgctaacggtagtttatgataaagctaattatatcgttggagttagcgaaatcagcaccagtgcagttaatgatgtgaattattttgttccaattattggactaagaatcaggaagaatgaatggcatcaaaatgtattgccaatttatccagccttagctgataagattgaaggaattttgagatagaaaaaagacaccattaaggtgtcttttaattatgaatctaatttttacaagtcgcttccaccatagttaggagcttctttagccatttgaacatcatgtgggtgagattcgcgaagaccagcgttagtaatttgaacaaattgactgttttcaatcaattcttcaattgtaccagcaccaacgtaacccataccagcacgtaaaccaccgtcaatttggtaaataatatttgaaacgtcacctttataaggaactaaagcttcaacaccttcaggaactaacttgtttgcttcgttaactccgccttggaagtagcggtcagaagagccgtgttgttgagacatagcaccaactgaacccataccgcggtaggacttaaatttcttaccttcgtttgtgaaaatcgtaccaggtgcttcagtggtacctgagaacattgaaccgagcataacggcatttcctccagcagctaaggcttttacaacatccccagagtacttaataccaccatcggcaatgatcttcttaccgtatttttgagcaacgttagcagcatcataaatagcagtaatttgtggaacaccgacaccagcaacaatacgagtagtacaaattgaaccaggtccgattccgaccttaacaacgtcaacaccagcgtcaaataaggcagcagttccttcgccagtagcaacgtttcctgcaatcagagtagccttaggaaaatgatcgcgaatttctttgatcttacgcagaacacctgcagagtgaccatgtgcagtatcaatcacaattgcgtcagcacctgccttaagtaaagcttcagcacgttcaaaagtatcactagtaacgccaacagcagcggcagctaaaagacggccttgagtatcaactgcagggtgagataagttaggatcaacagctttagttttagcttttttaacctcttcaacctgggcttcgattgaaaggttcttgtgaataacacctaaaccaccattttcggccatggcaattgccatatcgccttcagtaacagtgtccattccagcagaaataagtggaatgtgcaactgaagattaggcgctaattttgtatcaagtttaacttcattaggcagcacatgactttcagctggaattaaaagtacatcatcaaaagttaatccttttttggcaaattttgtttcccacaaactcattgtaaagtcctttctatagaagcaacgttttaatattaaattagctaaactttactcgaatctggaccagaagtcaattggaaatttgatttatttttttaacaattaaatttgctagtaacttataaccgttgactccgaagtgaagtccgtcattcttttttccgttgaaaatttcgggaaagtttttattttcttgcattttacttgcaagatcaataattgaaaatttgtattcactagctacttttttaacaatattgccgtattccataactaagcggttgtttcttactctttgtttattttcatccactgctggcggagtgataaagataactttttctggataataaagccaaataatgcttgatgcaattaactctaaatttttttcaaattgacgaagaggaacttgcttatgcgttgctaagtcattagtaccaactaaaataattaggtagttacacttaggctggttaaaaactagattaggtaatgaaagagcaagaccaccagaattaattcctgaaattgcagtgttgtaaatattacaagaaagaaatttttgtagctgaaaattaagttctggaattgagtggttttcaggacgggcaataatgctatcaccagttagaagtaatttcatatcagaatcctttagttagaaaaaagaccttgagaaaaatctcaagatcttttttattatcaataatttaatctttagaacttgttcttgtctaaagcaactggtgagtcaggcttttcaccgttgattaacttcaagttgttgtcaaatgccttaacaaccatgttacgtactgcgtgagtagtgtagaaagcagtatgtggagttaccaaaacatttggacgatcgattaagtcagctaaacgagcatctgggaattctttgccttcccaatccttgttaaatacaccaacttcaccttcgtaagtgtccattacgaaaccaaaaatcttacctgagtctaaaccacggataacagcatcagtgtcaacaagtggaccacgtgagcagtttacgattacaacgccgtccttcatttcagcgattgacttgtcgttgatcatgtgaacgttagctggaacatctggtacgtgaagtgaaattacatcagcttgcttgtataagtcatcaagtgagtcaacgtagtaacccttcttttcaagttctgggttcttgaagatatcgtaagcaataacctttgcgccgaaaccttccataattctcataaatacttgaccaatgtgaccagtaccaacaacaccaacaacttggtcacgaacttcatgaccaatagtaggtgcccagcgtaagtcgcgcttagccatcttttcatccatacgcttgtcttgacgtagtacacgagcagcttggattgcagcatgttcagcaattgcgtcaggagagtatacaggaacgttagtgatttcaaagcctaattccttagccttgtccatgtcaatgttgtcaacaccaacgttacgtaatgacatcttagttacgccagcatcagctaaagcttgaagagtttcaggggtgtagtctaattgttggtaaacaacaacaccgtcagcacccttagctaacttagcagtttcaggagtcaaaagcttgtcagtgtattcaacttcaacatccttgtgagcatctttccattcgtttaagaaaggttcttcatctttacgaatagcgtaagcaaaaatctttgtcataaattcaacctccgtcaaaattaatagtatgaccgtcttttattatacacttgactttgttaataaaaacacaaaatcgaatttttttgaaacttattttaaagatgtttcatgtgaaacgataattgcagtgaaaaatagattttcttttgcgtatcattatgggctgccttatgataatggttagaaaaaagaattgaaagtaaagctactaaaatgttattaaaaatcagtcaaaatagatgagggaataagtaatgtcagttgttgtgaaatatatagatttagataataattcagctgagctggcaagttcagaaacgttaaatggaaaagtgggagaaagagttaactatcatacagccgaagaagtccaaaagctaatagctgctggttatgtattagttaataatccgtttgatctgaataatgaagtacatttttttaatgaaacttctcaagaatacaagctcacttttaaacatgctcaagaagaagtgactgctaagaatttaaaatacgattgtcaattaggggatgtgcaacttaaaggaaagcaagtagtccattatacgggtcttgaaaaaaatattgctgacaatatagttgaggttacttttaatagaaaaattatctacgacaaagttactaagcagaaagtgtcactaagcgcctggcagccagaaaagtattatttgccgttaattgctacacctgctgttttagattatacgcctgataaaacggtaattggcggagaagctgttacagttcaaaagcctaagcatgagtacgtcgttacttatttgcctaataagaaaaatgctagaaggcagaaagctgaaatcaagtttattgatgttgataacaataatcaagaattagctaactctggcgaattaaaaggtaagcccggcaaagaaatttcttacagtacgacagaaactttaaaagaactgtcagataaaggatatgaagtcattaataatgactttgattctaaggaccaaaagcctgtctttggaaatagcagagattacattcaaacctttattattgccttaagacataaaaaacaagccgttaattctgatcatccttcttcagaaattgatcatcgtctttatgaaaaagaagtacatcgaaaaattactttttcaggtttaagcggtcaaaaattagatgatatagttcagactgctgtcttaaaacgtagtctaacaatggacatggttactaaaaagattattcaaggtgaatacactagtcagtggcaaagcacagaaacatatccttcagtagccgttcctgttgttgcaggataccatactaaaactaaagaagtagtagcttgtcccgtagtagaagaagacttaagcgaagacattaagtactatgcaaatggttatttgattccagttgatgcaaatcataataagctttctgaaatagataaaaagcaattaatcactaattctattaatccaacgaaggcaattttccctaaattagagcttgaaaatattgtcttaaagccaattaaaggagtagaaattaaagatccgggacgagactatgaagttccatacttattagttcataaatatattgccgttgatgaaaagcatcctagagaggaagtaagtccagcatattataggagaattgttacagctcgcgttcattatcaaggcgctggcgaccaaactcctgctgacgcagaacagatagttacctggacaagaacagtaacttatgacgaagtaagtagagaagttattgataatggaatgtacacgacagagtggctagctgataaagatatctttgaggcaacacctacgccggttattaagggattttgcgctgatattggcttaattggcgaacatccagttacagaaacagacttaatggcgacagttacttatatgccagttggaagaatgatcccagttgatgaacatggaaatgaaataaaaaatgcgatgcgttcgccatacattaatgacccatatgatccagtgcgggtactttttacctaagaagttccagaagtacaaggatatgctctggttaataatacaatttcagttaatgatccattttctgataccaaggtaacttatactttgaagcctcgctatattccagtgaatagtgaacacccatatcgcccgatcaagccaacgatgtatagcgtgccagttaaggaaacagttaaatatcagggagctgatgagcaaacgccaatagctcgtttgcaagcagctcgatggactagaacattaacagtcgatgaaaatactagtgaattaatagacaatggtaaatatacaacagcttggaaagttgataaaaatcgctatgctgcagtaaaaacaccgataattgatggctatcatgctgataagaatattattgaagcaaaagaagttaaaaaagctgatcttgattttactgtaatatataaagccaatggacgtatagtaccagttgatgcaaaaggcaatttgttagctagtgttgatcaaccatcgtatgtaactgatccagaagatgcaacaaaggttttaccaaagcagggtgtacctagaataatgaattatgtgccagaacaagaagtgattacggtaggggatgctagtgaagatacactagttagatattacacatttaacgaatggggtgaattaaaagctaagaaagcggctgagcagaaacagaaagatttaaaaacaaagaaaccgattgaaaataaagatgagcaagaaaagatggaaaaagtagaggaaaggcaattaaaatcagctgaagaagagaagaaatctgagaaaaaagatactggttttaaatccatgttttcttggcttaagtagttatataacaaatttagtatagattttttgttatataaaaatataaacaaaagcactatttctgtatacatatagaaatagtgctttttcattatataaaaacaacacataaaattcgaaactgtcaaattttttgtgtaaatagatttttctcgtagattgattttttaatcttttatttaatcaaagtaggattctaaggtatcctgaacctgaccaaagcctttgtgaattcggttgaagtagcggtcattgtagctcattgcttggatgccaataaaagtatcaagcgactgttcagtcgggaactccgctttaggcttagccttgcgcttaatgacgttattaaaggattcgatcatgttggtagagtaaattgaagccctgatctgcttaggataattataaaaaacaagcaggtctggctcgatgtctttcaggtttctaatgacacgattgtagctcttgttccatttggcataaaaagcatgcaatacatcaacagcagccgctttattggcttgctggtgaatctgcttgaattcgttcatgattgcctcgcgatcgtccacgcgtactttagcgcagatgttgcgcataacatggaccaagcagcgttggaaatgagcttgaggataggtctttgccagtgctgctttcatgccgacaacgccatctgaaaggaaaagctctacttgctttaaaccacgagatttcatgttctggagcaacgccgtccagacttcaatattctcactaggcgcaatgcagtagtcgataacttccttgtgaccattaggcttgatgccaatggcaatatatactgcttctcgttcaaaagtttctcgacgcaacggtatatacgttgtatcaagataaacacaaaagaacttatcgctcagcttacgcttgtgataagcctcaactttaggaatcatttgcttagagatattagacacttgagctggactataatgactgccatacattttttcgatcaaattagctatttctctagtggttacacctttagaataaagctttataaccatatcttctaagagatcagtatgttgtttatagtctggcagagtgtgttgatgaaacataccattgcgatctcgtggcacttgtacctcaattgatccaaactgggtatcaattttacggaaatacgcaccatttctagaattaccagtattccagccatttctagcatagggatcatatcctaaaaaggcagtcagttcagattctaacatgtcattaacagcttgttggatttcatgacgaagcaaatcattaattttatcttgattgaatagagcttgagttatatttttggtaaaatcattcatgaaggagttcttctttctgtatgttttttttgttcaaaccaatcatacgagaaaggaactcctttttctaatgttttaggaaattaaattaaggaataattcatccttacacaaactattttacggtctctaaaattcgaatattattcataaaatgaacatacttttttgaataaaaataggctaaatcctataaaaacaggcattataatagataatatattaaattaaataaccgttccccctatttttgaaataaaaaatacatgttataataacactaacatttagatggtatgaccaaaatatgtgatttattatgatagtaaatgaagggaaacagggatgttatctaagaataactaccaagaacgtttaagaaaaatggatgataaacaagaacgtttttcaatccgtaagttttctgttggtgcagcttctgtattggttggtacagcaatattgagcatgcaaaatgttcaaactgtacgcgctgatgcaacaactgatactgaaaaaggtacaactgatgtaacatcaaaaaatgatgaacaaaataagcaaaaagcttataaccaagttgtttctgaagatcaaaataaggcaagtaaaactaccgatactactatggtgggccaagatagcaaggtagcttcttttagtgcgtctaaaaatgaaggtacatttgcagaagcctctagtgaagacaagacttcatcaactactgatgcacaaaaggtagaatctaaagttgcaactgctaaagcaacaactgatactgctaactcagttaagaccgcatcaactactagtactgatcaaactacttcggtaaacactacgactttcaatactaatcagtcttcaactgcagcattattttcagcttcagcattgagtgaaagtaaagcattagctgcaactccacgtgcaagttcagctactactaatgctcaagctaagaacaataattacaagcttgtaactagttcaagtgaacttcaacaagcaattaatagtggagtagctggtattaacattgatagaagtattgatgcttctaacgttaacttagcaattaccaatacttttgcgattgttggtatcaatgacgctgctgtccttaacttaggtcaaaaatctcttaataattctggtaacttaactcttcaagatattactatcaatggtgctgtttctggtaatggtactgttaacattaagggtaatgttacttctaatgtcaatgaaaataactcacttattaaaggtgcaacagctgatgcagctaatgcagctttaaaagatcaaacaagtactggtacgattggaacacaaggtacaagctgtgcaagtggtagcagtaatcaaaatggttggacagttaaaggctggaattatgcaaactttagtggttctaaggttaatgtagcagctgatgctaacttgactattaatcgttcagcaattggtgatggtattcatttagcaaataatggtacagttaacgttgctgacggcggtcagttgactattaatatgaatactaacaacgatttaaatactactgctcgttatcacaatgcaggtattttcgctgtgggtaatggtaacttcactactggttataagtcagttgttacattaaatacgagtatcggtcaaggtattgccatgactggtatgagaccttatgttactgatactgatgtttttggtggctatagcgctcgtgatcgtggcgatggatcaggtcaaattaatttaggtcagtattcaactttgaacttcactggacgtgatggtgttattttaggtaataactctaattttaacgttggtgatagtgcaaacgttcactttgaaaacaaaggccgtggtgttgcccttgatttagctgctaatagtaatattaatattgatgatcacgctgtaacttatttccattctgttggaaagactactactaacgcacttggtaatactgttggtgcttcaggtagctttagtggctataactatattggtgtaaacgaaggcggtaacattactgttggtaaatttgcaacatttagagttattcttgagggtcgtggtaacaataattatgatgatgttgtttcattagactcacaaaatactaataccaatgctgcatttacctctaaaactggtgcaattgtcgatatccgtgatgacaacactaacttctatgctgaattaatttcattcccattaggtgcatctaacactagaattgatatccatgatccattaatgcttaacttacagcgttactcaagtggtggtccaactactggttggatgccaattggtggagatatgatcaatacaacatcgaaccaatatactgctaacttaatttatatgagtggtagtaaaggtgtatttagtgtagatggtactaattacgttgtttatcaaaaaattaagtctgatggttctaagcaaatttggttaaacgttaatggcgttaatattccaatgagcggattccaaactaaagatatttgggataatcaggcaaacccggatgtatcaattaaaggtaacgacttaacaagtggaattagagctaaccaagttcacaactatgatggtactccattaactggtaaggatgcaccatattacggtatttctactcaacgtgctagtcaacaaatctggttcccacacaagactcaaatggaagtggttggcagccataccaataccattaaatacgtttacgaagatggtactccagtacttgatgaaaatggtaatcaaattgttaagactcaaaaccttaatttaactcgtaaacttactcttgatatcactgatgacaagattgaagaaattcaaaaatatgccttaacacataatgctgatcaaactttagagtatattaagaatgcacaaggtgtaagtgaagactctggttgggtttatactgatgctcaaggtaatactgttactgatccatatgctactgttgtttctccagttgaagatggccaaactgcttctattgaatcttcaaatgttcctggaatcactgaaggagcagatggaacctctgtaactgctaaattacaatacaaagaagaacttgttcaaaacggtgagttatcaaataactataaacaaaacggacttagtgcaattttacctgataattacgaaactgtagttgtttacaagaaggcaaaagaagtaacaaatactcttaagttctacgacgatacaactaagtcatacatttctactgttgccgatcaaacagcaactggtaaagaaaatgatgatgttaactttaaagatggagcaagtactgtaaagtcattagaagatcaaggatacaagtttattaatgtaaccgatggtactcctgatgatactaatgcaactgttttatctggtgacacatttagtgatgttgatttcggtaagtttggtaaagacggcaagacttttgtagtccacttaactcataaagtagttccagtaactcctgatactccaaatgttccatcaaacagtaaagtttctaaagacgatcttactaagacagcaactcgtactattcactatgttgaaaatgatcaaaacggtgcggaattaaaagaatcaactgttcaaactgtaaactacactggtactgcatatgttgatgtagtaactggtcaaatggtaaatgctaaagctgatggcaaagatgctcaaggcaatactacttatgtagttgacactgacaacaagaagcaaccatcaattacttggactacagataacaacggtaagtttgctcaagttactccagatgcaagcatcaagaagggtgatgatacttggacaactggtgtaaaatctgttgatgaaaagaatgctccagatgtttcaactatcactggcaagacaactaatgaagatgtctatgtaccatatactttaagccaaaagacatatactggtactaaggaaactaagaccgttactcgtgtaatcaactatcttgataatgaaactaaacaaccagtttcagatgccgtagaacaaacaactactttatctcgtacacaaattaaggacgaaaaaggtaacgtaattggttacggtactgtttctgaagatggtcatagttacactttaaacaatgactggactattgataaaaatggctgggtagctcaagtttcaccagatgaaactgctaagggttacaaggagactcctcactttgaagatggtaaagatgcttcaactgttgctgccgatactccaagtgtaactgatccacaagatgttacagttaatgtcttctacgatcacgacactactccagtaactcctgacaagccaggtcatgggctaacccacgatgacttaaacaaagatgttactagaactatcaactatgtagatactactggtgctgcagttaacggtgctccagatggtaagagtacttacactcaaactgctcacttcactcgtactgctattgttgataaggtaaatgacaaattgcttggctacgatattaatggcgatggttctgttgatatcagcccagatgctggtgactttgcatggaagtcaactgatgctaatttacctgcagtaacttctaaggctcctagtgaagttggatacgatagcgttgatactccagtagttcaagctacaactgttgcttataattctgaaccaatcaacgtaactgtaacttacagtaagaatgctcaacaagggtcattccaaattcattacattgatgaagataacaataatgcaattcttcatcaggatactgtttctgataaaattggtgattctgtaacatactcaactgctgatcaaattcagctttgggaaagcaaaggatacgtccttgaccaagatggttacactactcaaactacagttaatgaagataacaatggcaagacttacattgtttcctttaaacatggacgtaagaatggtactactgaaactcttgtaccaactgaaactattcacttccaatacgcagatggtactaaagcagctgatgatgtacatggtaatgcaggtgactttaagtttactcgtactccaattattgatactgtaaccggtcaaatcgttgatccaggtacttggaacaaggaaagttacacttttgatgatggtcaaaagaacgttaaggtaattaatggctacgttgcagataaggcaacttatggtaacaagactgcaactccaactgacttgaatgttgaagatactgtaacttacagaaagattagcaacattatcccagttgatgaaaacggtaatcaaattccaggaactactccagtagattacaagaacgatccaagtgatccaactaaggtaactccagacgaagaaagtccaaaggtaccaagtggctggacaatttcacctaaccaaccagaaggtgtaactccaaatactacaactaatacggctaaagtaaccccagtagatcctacaaaaccaactaatgttgtgtacactaaggacaatgctccagtagataaagctactgtaattgttcgttaccacgatgacactactaatcttgatctacctgaatcatttgactcaggtaataaagaagttggtacagatactggatacactcaagctgacattaacaaagtggttcaagaatatgaagctaaaggttactactacgtaactactgatggcactcttccaactactatcccagctggcggtgctactattgtggttcacttagctcacaaccaaattccagtaggtccagatacacctgataagcacggcgttgatccagatcaagttaagaaggcatacacttcaacacttcactaccaagatagcgaaggcaagactttaagtcctgatcaacaacaaacttcaacttggactcgtacagttactgttgatactgtaactaaccaaattgtaaatggtggtaaatacgacactaactggactttacaagatgcaaatgataaatatagcaactttactgttccagtagttgagggttacgttgctagaaagactacaaacaacggtgcaactgtaactactgttgttgcaggtcaaactaaggtacaacaaaacttagaagatactgttgtttacgataaagttggtaagcttgtaccagtaggtccagatggtaagactccaattccagatgcaccaactccaagttatccaaatgatccaacagatccaactaaggtaattccaaacgaaccagttccagacgttcctggttacactcctgttgatccaactcctataacaccagaagatccaactaaggatactccagttccttatactaaggatccagtaaaggctggtttgactgttcaatatattgatcaagataataacaatagcgtaattaagtctgatgcagtagatggtaatattggcgacaagatcgactacagtactgcaagctcaattactgactttgaaaacaaaggctacattcttgtaactgacggctttactggtcaagcaggagatgaatttactactgaaaacaatggtcaagtttacaaagttgtcttcaaacacggaactcgtccagtaactccagaaaacccagcagatccaaacgagccagtagatccagatcatccagatacaccaactccaagtaatccaaacttgagtaaagaagatcttcaaaagacgattactcgtacaattgaatataagtatgcagatggtacacaagcacatgaaccagttaagcaagaattaacatttactggtaaaggtactattgacttagtaactggtaacttggtaactgttgatgaagatggtaacattactagccaaaacggcaagatcacttggaaccatgagagtcaagaatttgaagcagttccagcaattgatcacgatggttactacatttcaagcattaaccaaagtaattcaacagctagtgttgatggtcaaacaggtgctgtaggtactgaaacagtaactccaaatagtcaaaatggtaatattgtaattactttgactaggaacccagatgttccagtagctgcccaaggatcaattaactatatcgacgatactactggtcaaactattgaaagtgcaaacttctcaggtaatgttggtcaaaagattaattacactactgctggtagcatcaagaactgggaagctaagggatacaatttagtatctaataacttcaaggatggcgaagaagtatttactgatggtaagaatgcgtttgaagtacacttagtacacgctactactccagtaacaccagaaaatccaggaaaaccaggtgaaccagtaaatccaactaatccagatgatccacacaagtatccagataactatgtaccacaagagttagctaagactgtaacgcgtgatgtaacttatgtttacgcagatggtagccaagcagaagctccagtacatcaagaagttaagtttacaggtaatggttaccttgacttagtaactggggaatatgtaactgttgataataacggcaagatcactggtaaaggtcaaattaactggaccccagaaagtgcaaactttgatgcaactaagtcaattgatacttctaagtaccaaattgttggtattaaagaaaacaatactactgcaaatgtagatcagactactggtgttgttgcgggtgaaactgtaactcaaaacagtaacaatagttcagttgtaattactttagctaataagcctgctccagtagttgaaaagggttcaattactgtaaaagttcatgatttaactgataatgttgacttacctcaatacggtaaggaaagcggtgaacaagaagttggtactagctttacttatgataagaatgctgtaattactgaacttattaacaagggctacaaattagttgatggtggtgaaaatgttccatctgaagtagctaaaggtgccaagacaattacaattcttgtagagcacgatactgttccagtaacaccagaaaatccaggaaaaccaggtgaaccaatcaatcctaacgatccagacggtccaaaatggccagaaggcactgatgagaatagtgtgaagagaacaggaactcaaactattcattacgaaggtgcaggtgacaagacacctagtgacgatgtacaaacattcgacttcactaagaagatgctggttgacaaggtaactggtaagatcattgactcaggtgaatggaatgtaactagccacacatttggttataaggatactccagtaatcgatggttaccacgcagataagcgtaatgctggtggttctgtagtaacaccaaatgacttgaacaagaaggtagtagtaacttacaagccaaacggcaagatcattccaactgatccaagtggcaacccaattccgaacgtacctactccaacttacccaaccgatccaacagacccaactaaggtagtaccagacgaaccagtacctgatattccaggtatgacgccaagtacaccaacagtaacgccagaggatccaggtaaggatactccagtaccatataacccagtagttccagctaagaatcaagttgcgcaagttatctatcgtgatgtacaagatggagctaataagcaattagcaacttcaggtgacttgactggtaagagcggttcagaaatcagctactcaactgctgatcaaattaagaaattaattaaccaaggttatgttcttaagaatgatggcttcccagcaggtgctgtatttgataatgacgatagtaagaatcaagtattctacgtagacttcattcatggtcaagctccagttaatccagataatccacatgaaggtattgatccaagtcaatacgaaaagactgttacggaaaaagttcattatgtaggtgcgggcgataaaactccagctgataatgttcaaaactctaagtggactagaactttaactattgacacagtaactggtaaagttgttgaaaatggtcaatacactactgattggtcaatcgctaagggtgaaaagactgtttacgatcaagtaagtactccagtaattgatggttatcacgcagataagagagaagttcctgctactgctgtgactcaagatgatattgaagtaacagtaacttataaaccaaacggcaagatcattccaactgatccaagtagcaacccaattccaaacgtaccaaacccaacttacccaacagatccaacagacccaactaaggtagtaccggatcaaccagttccagaagtaccaggtatgacgccaagtacaccaacagtaacgccagaagatccaggtaaggatactccagtaccatataatccagttaagaatcctgataaagtaacaacagttgaaggtaaacaaattgttcactttgtagatggtgacaacggtaacactccacttagagatccaaatactcaaactcatgagtttaagatcaccaatggtgtaccggatgaatcaagccacacatttactttggttgatgttccagtcattccaggatatgttgctgaagttaagtccgctggtggaaagacagtaaccccagatactcctcttgcagaagtaactgttgtctaccataaggttggtaagatcgtgccagttgatccaaatggcaacccaattccaaatgtaccaaccccaagctacactaacgatccaaccgatccaactaaggtagtaccaaatgaaccagtaccagctattactggtaaaactccagataagacttcagtgactccagttgatccaactaaggacactccagtggtttacaagaataatgaagttccagcaactccaaattcacaaaaagctgtagttaactttatcgatgttaatactggtaagcttatcaagacttctggtattctaagtggtcgtccaggtgaagacatcaataagttgtactcatctgctgaagtaattaagcagttagaagaggctggttacgaagttgtttacaatgcatttgatggcgatggcgtaactaagtactttgacgatgatgacaatacaacacaacaatttactgttgctttgaaactaaaagaaaaagctaagacgccatatccagttgttcctgctccagaaaccccagctaaagagccagaagctccagcagaaaaggtatctagacctgaacaaccagttaagcaaaatgttagtgttccaactccacaaaagcctgtagagaagaagactaataataagaaagaagttctacctcaaactggtgcagataataatgaagcagcctcaattttaggagctgttgcaacagcaatcggtatgactagcttaattggagcaaagagacgcaagaaagatgataaataatttttaaaattaaatatctttttcaaattagctaataaaaagggcgttgagacttgattctcagcgctcttttttaatacattatatttgtaaataaatgcgtatataagttaggaaaagacatacaatgatagagaataattcgctttaagagggggcagctagtgtatggataatttaagtgaaaaagccgcatccgtggttatcaagtatactgatttagataataacttagccgagctttcaaattctggaagtttgaccgggaatatcggcgaagtaattaattatagtacggcagatgaaataaaaaaattagcaaaacaaggatatgtattagttaataatccttttgataataaagggaaagcgccagtatttagtggagaccaagacagttacatggttacttttaagcatggtagagaacgcgtcactgctgataatctaaaatatggctgcaaacttgaagatttgcaagtaaagggaacacaaactgttcattatgttggtgcaggaagtcgaactccgcgaaatgaagtatcaacaattacttttaatcaaatcctggtttatgatcaagtaactgggaaaaaaattggtagtaaaggctgggaaaaagttgaacagtctttccccgtagttgctgccccgagcattttaggctatattcctgatcaagtattagtcggaggtaaggcagttactgctgatgctcctaaccgggaatatactattacttataaagttaatgaacatatttctaataaagaacaaaaggctgaagttaagtatcttgacattgatagtaataatgaagagattgtggaatctgaacttttaacgggaaaaccaaatactaaaattaactatagtactatcgatcagcttaaaaagttaggtgaaaagggatatgaagttgtaagtaatggctttgacgctaacggcgatgtccaattcttcgatactagtgatgaatatgtccaaacttttatcgttaccttaaaacataagcaagtcttggtaaatgcagaaaatccactggatgggattgatgaagcagaatatcataagacaagcaaacgcgttgtttcttatgctggtgctgaggatgaaacgccagaagaagtagttcagttggtaaattggaatcgaaatcttactgtggatgcagctacaaaaagagttatcgcagacggaaaatatactactgattggaagccagagcgagaatcatattcagcaatttctgtgccggtagttagtggatatcatactcgtattaaagaagtgcccgaagaaaaggcaagactggctaatataactgaaaagattaggtatgtaaaaaatggctacgtgattccagttgatgaaaatggacaaaaaatcgatagtttacctaaattacgttttgcgtcagataaagatgacccaactttagtatccttgccagagaatagtttaaaggatgaaaagtatgagccggaaaaggttgatcttactgaaattgatccagcaaaagattttgaagctaaatatcttttgaaacataaatatgtgactattaacaaagataactctcattttgatattaaccctggttcatatcgtcgtactgttacagcaatagttcgctatgaaggagcgggagataaaaatcctaaggattctattcaaactgttcagtggaatagaagcatcacttatgatgaagtaacaaaagaaattctggaagacggaaaatatactactgattggaagccagataaagaatacttcgaagctgtagatacaccagtaatttctggatttactgctgatatcggagttgttgctaagcatgatgtaacgcaaagcgatctttttgcgacggttaagtaccaaaagaatggtgcaattattcctgttgatgaaggtggaaaagaaattgctaaagctaaaccaattccatttcttactgatttaacagatccaactagagttttagcaactgaagaaattcctgaaatcaagggctaccgccgaactgaagaatcagttttaattaaagatcccttaaaagacattaaagttacatacattttaaagccaaactatgtcttagtggatagtgaacacccgtatcgaacagttaagccgcacaactatagtattcctgttaaagagactattcattatgtaggtgctgacgaaaaaactccagctgatcgaattcagggtgcacgctggcgtaggtctttgacagtaaatgataataacggaaaagtgattgaagacggcaaatacactactgattggagcgttgataaaaaagaatatagcgcagctgtaacgccagtcgttgatggctatcatgcagatcagtatcaagttaaagcccatggggttaataaggaagatattgatgtagaggtaaaataccagagaaacggtcaaattgtaccagtaaactctaaaggtgaaaaaattgaacatgcagattgtccagtttatatcactgatccaacagatgcgacaaaggttctgatggagcagcctgtgccacggctattgaactatatggcgcaagactcttcgattgttgtcaaagatccaagtcgtgatactaaagttacttattatacttttgctgaaattaaagaactaagttcagctaaaaacttgaaaactgagatccaatcaattgatggaaaaactgcaacttcgaatgttgtatctcttccagttaatggcaagaggagaaaagcggttgttacattcgttgatttgagtaacaatgcaactcaaattgcatcttctggtgttttaagcggaaatgttggtgataaaattactgacttgtataacacgagtaagcaagttgaagagcttaaaaagaaaggttatgaagttgtctacaatggttttgatccaaaaggtgcaagtaagtactttgaagaagatcaaagaaaggttgctacctttacagttgctgtcaaaaaagtaaagcagttaaaacctaaggaagaaaagcaggctgaaaaaacttctaaaaaagtaaaagaaaaatcaaaagcagctaattctgatgaaaaaaagaagaaaaatcataaagttttgaagtatatatttccgtggatgaaataaaagatagaaaactagatttgtttagtcaaatctagttttttattgtaaaaattttagaccaattttttatgaagaagtgtataattaatttccgaaaaaactttttcggaggaaatattgtgtctgacaaaagcgaatcgctgactaaattagaagaggatgaaaagtataaccgactaacagcattgaagttatttgcgatgacttcatcaatggttatttcagttaatgaactagctccttttggaaaaactggaccaactgcagttttttatttactattagctgggctaatatggtttgtaccaattacgcagatggcaggagaaatggcttctattgacggctgggataagggtggaattttcacctgggtaaaaggatcgctgggagaccgcgctggttggacagcaatgttttatcagtggattcacattacagttgggatgaacacgatgatgtacgttattattggtgcattgtcgattacctttaataccccctggtttaatacgacaccaagtattagatttttgttgatgatggtaattatctggtcaattaccatcgttgaaatggttggagttaaaaagattggtcatattgcagaatggttatttgccttaggaattgcgttaccagttattttactgatcgttacgttctttatttatttaagtcaagggcgtcccttatatatgcatttaaactgggataatattattccgcatcatttaactgggactactttagtagcttttgtgccatttgtgcttgccttttgtggtggggaagcatctgcaccgcacgctaaatatttagaaaaccctaagaagtattctactgtgatgcttgctttagcaattacggctatttcttttgatttattaggtagtacagcaattggaatgtcagttcctaaagatcaaatccaaaattcaactggttttgtctatactttcggaaaaattttagactcaattggtttacctggtgacttgattaagaaatttatcggtgtattattagcagctggtattattggggaattaggtaattggcttgctggtcctagtcagggaatgtttgaagcagctaaagaaggttacatgcctaagttttttgcaaaatctactaatcgtgatgttccaatgcgattaattgttttacagactttgattgtaacggcatcagctgttttaattacttttactagtggaaaaaactcggattttgcctttaatgtttctttagcagcgactactgcgcaatacttaatggtttatattttgatgttaatttcttatattattttgaaaataaggcatcgaaatttaaaacgtagctattatatgactaaaaacaatgcgttaggcattacgattgcaattattgccctggtaataactgtagttgctttctttatttcatttattcctgctcaaggcacgccagcatacttaagagaagtttatatttggacgatgattggactttgcgcaattgttacaattctaccattggtgatttatcattatcatcatcgcttttaagtagaataaatgaaagtttaaaaaacattaataaagtaaactttttgcttgtaaaaagttattaataagattacatttaagatgtattcaagtaagaagtgtaaagcaaaagagctatggtaaatttgaggtatccatagctcttttgttttattaaaataatgacttaaggaataaaagaaaatgaataatcctgaagaaatacagcattttattgacgttttaattaaagaagatagctttgtcaaagctgctaaaaaattatatatttcgcaaccatatttaactcaattaataaaaagaattgaaagccatttgggtactccgattattaatcgagataaaaagccatattcattaacgcaagcagggttactttattatcaatatttagaaaatgtctcctatgataaacagcaattgaataaaaaaattgctaaatatacacatcctaataaagaaattatcaaaattggtattttagaaagcttaggaacgtatttactaccagaaatattgccagattttttgaaacaaaatccgcaagtagagattcagctttttgaaaatttgctgagtggaaatattgactgctacattggacaaactcctgaagcaattgattcaagcttagatattgttagtaatggcggagaaaagtattatattgtaatttcaccagcttctccttattatcaagctggaaagtttattcttgatccaaatgaattagatctaaaagagttactacaagagccattcgttttaagtgttccaggttccgcaattcgccatcaagtaaatggtgtgtttcaaagatttcacttggagcccaaggtggttttagaatctaaaagtattattacggctactagtttagcaattcatggaatggggctaacaatttctacggctagtatcattaaacgaattggtgagacgccgattaatttgttccctattagccatgatctgattaatgtcgttttctttattgcatctaggcggggaaaaaacaaatcaaaagccctaaaaaatctaattagagaatttaaaactaaaaacttacaagcaatgattagataagattcttttttagataaattagctataacaaatttgttattagcaagttacaaaaaagatatttaagcagtgagttttaatcacctataatttaggtgtgaaaaaggtttaagaaggggcaatagaattatgaaatcaggaaagtatgaagttagagctaagggccatggcgcaagtttcatgcctatggaagtaaccctctctgaagatgaaattgaagatattaaggtagatgctaagggcgaaactaagggtgtggcagatgaagtctttagacgcttgccagaagaaattgttaaaaatcaaactttaaatgttgataccgttagtggtgccactatttctagtcatggtgtgattgatggagtagccagtgcaattagtaaagctggtggagaccctgatgagtggaaaaaacgtgccaagcctgcagaacaaagagaaaaagacgaaacatatactactgacgttgtaattgttggtgctggtggtgcaggtctagctgcagcagcaagaagcattcaacataataaaaaggttattgtgcttgaaaaattcccacaaattggtggtaataccagtcgtgctggtggcccaatgaatgcggctgaacctgattggcaaaaacaatttaaagctttagctggtgaaaaggaaactcttgaagaactggcagcaactccaattgaaaaaattgatccagaatatcgaacagattttaaggagttacaaaaacaaattaaagaatatgttgcttctggagctaattacttattcgactcaaaattacttcatgaaattcaaacttatttaggtggtaaacgtacagatttaaagggtaatgaaattcatggtaattataccttagttaaagaattagttgataatgctttagattcagttcactggttggcagatttaggagtagtttttgatcgcagccaagtaacaatgccagttggtgccttgtggagaagaggacacaagccggttgagccaatgggctatgcctttattcatgttttaggtgattgggtaaaagaacatggtggcacaattttaactgatactcgtgctaagcatttaattattgaaaacggaaaagtttgtggtgtaattgccaaaaagcctgatggcagtaaaattactattcacgccaaagcagtaattttaactgctggaggatttggcgcaaatacgccaatggttcaaaaatataatacttattggaaacatattgatgataatattgcgactactaattctccagctattactggtgacgggattggtcttggtaaagaagcaggtgcagatttagttggaatgggctttattcaaatgatgcctgtttctgatcctaagactggtgaactatttactggtcttcaaactcctccggaaaactatattatggtcaatcaaaagggaaagcgtttcgtaaatgagtttgcggaacgtgacgttttaactaaggcagcgattgataatggtggtttattctacttaatcgctgatgacaagatcaaagatactgcttataacacaacgcaagaatcacttgatgctcaagttaaagcaggtaccttatttagagcagatagcttagaagagttagctgaacaaatcggtatggatcctgatactttagtcgatacaatcaagaaatataattcatatgtcgatgcaggaaaagatcctgattttgaaaagtctgcctttaacttaaaatgcgaggtggcaccattttatgctacgccaagaaagcctgctattcatcatacaatgggtggtttaaagattgatactggtgcacatgttttagataaagatggtaaacaaatttctggtttatatgcggctggggaagtagctggcggaatacatgctggcaaccgtctaggagggaattctcttgctgatatctttacttttggtagaattgccgcaaacagtgctattgatgaattagaaaaatagtatagatagattaaaacgttgtaaacactagtatttgcaatgtttttttgctaaaatactaaaaatacctaattttttggaggacttgaattgagagaagcgcaggaaaaaaagttaactacaaagcaatacttaattgtagcatcgatgatttttgcactgttttttggtgcaggaaacttaattttcccacttcatttaggccagcttgctggtaaaaactggggaccagcagcaattggtttttcaattacaggagtagtcttacccttactttcacttcttgcagttgcaattactcgcagtaatggtgtttatcaaatcggattaccagtaggaaaggtctttgctctttcttttatgactttgatgcagctagcaattggtcctttatttgcagcaccaagaaatgccactgtatcttatactgtggggattgcacctcttttgcctaagcaatttcatggaatcggtttgattgtctttacaattatcttttttgccatagtttatgtgattgcctataacgagagtgatattctttcttctttaggtaaaattctgaatccgatctttttaattttactttttgttgtttttgtaattgcgtttgctcgcccacttggtaatcctgagatggccgcacctactaaagaatatatgaacggcgcaatagttaagggctttttagagggctataatactatggatgctttggcaggcttagcctttggggtaactgtggtaacagcaattaaagagctagttaataatgacaaaaagaaaactgctaaaatgactgctaagtcggggttaattgcagtttttgcaattggtataatctatactttattaatcgttattggtgcgatgtcattagggcattttaaaatagcgagtgacggcggtattttattttcagagctcgttaagtattatgctggtatttttggacaggctttgttagctgttttaatctttttagcctgtttaactaccgcagttggagtcttagcagcttttgccttagatttcagtgcccactattcaaagattagctataaaggttggctaacaatcggttgtttaggttctttagctacagcaaatttaggtttagaaaagatcattcactggtcacttcctgttttaatgtttttgtatcccttggctattgtgttaattattttatctgtatgttcaccactatttaaaggtgacatggtagtatacaaaattacgatgcttttaactctagttccagcgattttcgatctaattaccaacttgcctgcaccaatttctggaacgcagttttataaagtagtaagtcagattcgcttgcaatatctacctttagctaatattggcttatcttgggttgtaccaacaattttaggattagttatcagtgtcttgattcattttgggcgtcgtaaagctaataaaatatagtagttcggctatggttcatttgaatcatggcttttttgttgggataatgaaattaggtgataaaaaatgagtttaaccaataaagtgctcgaaaaagatgtgcatgatttatttactcgggtagcgccgcattatgatcagatgaataatttaattagcttaggtacacaaaaaagctggcgcaagagatttttaaaagaattaaaagtagcaccgggtgattttgccctagatttatgttgcggtacaggcgatattacgattgctttggcaaaacaagttggtccgtcaggaaatgtaattgggcttgattttaaccaagaaatgcttgatttagctgagcagaaaatacgtcagcaaaatttacaaaaagaaattcagttaaagcaaggggatgcaatgcatttgccttacccagatcagagttttgatattgtaacgattggctttggcttacggaacgttcctgacgcaaatcaggtcttgaaagaaatttatcgagtattaaagccaactggtaaagttggagtattagaaacatcgcagccaactaatccgcttattaagctagggtggaagagctattttaggctgtttcctagctttgcgaaattactaggagccaatgtatctgattatcaatatttgtctcatacaaccgctgaatttgtttctgcgcagcatttaaaagaaatgcttgtaaaaaatggatttaaaaatgtgcaggtaaataaattaaatctaggtgcgggtgcaattcatgtcggaattaagaagtaaatgagctaaaatataaaataaaaactaaaaaaaggagaattttatgaaaactggtactaaaattattactttagacaacggttatcacttgtggactaatactcaaggtgaaggcgatattcacttattagcgcttcatggcggacctggtggcaatcacgagtattgggaagatgctgcagagcaactgaagaaacaaggattgaatgtacaagttacaatgtatgatcagttaggttcattatattcagatcaaccagattattctgatccagaaatcgctaaaaaatatttaacttatgaatatttcttagatgaagttgatgaagttcgtgaaaaacttggtctagataatttttacttaattggccaaagctggggcggtcttttagttcaagaatacgctgttaaatatggtaagcacttaaagggtgcaattatttcgtcaatggttgatgaaattgatgaatatgttgattcagttaacagaagaagacaagaggttcttccacaaactgaaattgactttatgcacgaatgtgaaaagaataatgattacgataatcaacgctatcaagatgatgtgcaaattttaaatattaattttgtggatagaaagcaaccatcaaagctttaccatttaaaagacttaggtggcagtgcagtttataatgtcttccaaggtgataatgaatttgttattactggtaagcttaaagactggcattttagagatcaacttaagaatattaaggtaccaacattaattacttttggtgaaaatgaaacaatgccaatttctactgctacaattatgcaaaaagaaattccaaattcccgtcttgttactacgcctaacggtggacaccatcatatggttgataatcctgacgtttattataagcacttagctgacttcattcgtgaagttgaaaatggtaattttaagggtgaataaagataaaaagtccatgcgatagtttctatattgaagctctagcatggactttttaagcatataaatcgctttcatgacatatattctatataattaataacaaatatagttttattattttaaggagaaaagccatgaagagaaaaataagtaaactacttgcagcgacggctttaatggggacactaggaatttcagtagtggcttgcggcaataatgattcaaccagtaaaactaaacagtcaagtgtaaagaagactgctaaagataaggcaagtaatacaaaaaatgcaacaagaaaaagtcagattaaacttagtcaaactgaagcaataaataagtttgataaaaagtattctgataaaaaattaaaagaaatagatctaaaattagatggtaataaatatctttatgaaattacaggatttgataaggataaagaatatgaaatgaccatcaatgccacaagtggaaaagaagtcaaatctagttccgaaaaattagacttagatgaacgtttgcaaaagggacttgatttagataaagtgatatctcgtgatcaagcaagtgaaatagcagaaaaagaagttaaaaatagtactgctaaagaatggactctaaaaatggatcaagataaagccatttgggatgtaactgttgaatcaggttcaagcaaacatgaagtagaaattgatgctatttctaagaaagttattaaatcagaaaaagatgattaaacaaaaaaattcagagtttttaagctctgaatttttttattagtatttttatagaaattaatttaataggtgattagcttgtcagcgttcatcgtttcatcgtctaacttataagtctttaattcaaaatcattttcaaagttgcagtaataagtcttagtagcagcagagtagcaagcggtgtagacagtgtattcatcgctacccagtttgttaactacgctacccttaatcatcgcaacagactttaagatgttaaagaacttagccacgttagctttttcacccttaacagttgggtaattaacatttaagtaagctgctttaacaaagcgatctgctggaatgctatcacctggtaaacctaagctgccagtgccaacgccccatggagcaactttttgaccgttccagctttgagctgtagcatcatgtggatctaaaccagtatagttgccaaggttagtaagatgccagttaaagtctggactgttagttaaaacgccaagcttatcatcgaagactttcattccgtattgttttgaaacttcaacaataatagcttcatctttgtcactaataatccagtgaagaggagcaactgcaaatgatgagttaagagcttcattaactaagttaacgttctttaaagcttcttttacatcgctaactttagtaaagttctgggtgacccagagcataatttcgtaagaagctaaattgatttttccatcaattggaccatcgctaaatttagcaaaatgtgggaagtttagaccagcaattccccaaccatcttcattgaaacaatcaaagtaagaaggatagccatcaactacaattcccataccgataacggcttttttagtagtcgtattatctaaaaacttatatggaagaggatagttgcgtggtgtgataattacaccttcaccataatcttgtccaacatctaagttacgtccaaagtagagatttccttgatcatctgtaaatcttaaaccagtacacattttaaaatcctccttaactatttagcagtagttttagcttcttgctgaatgatgtatttcttttgacttctcttaatttgaataacggcaaatactaagatgatgaaaccaattgctacaaaggcaatcatgaagtaccaagcaactgtaaagctggcttttcctttaataattccgaataatggagcaccaatagcatatccaattgcataagctaaacccacatatcctagcattacaccttgatctcttgaaccaaagagatccttggccataaatgcaggaccagacatgtagctaaatacagctaaaccacagaaaatagcataagcaacacctgcgattttacttacgtgagcaccataaggttgaaaactgatcaaaaccatcattaagatggataaaacatacatgcagccggcataagtcattgatttggcagtaccaaatttatcaaataagaagccaccggaaacatttccaattaaacaaccaacaccgtacattgatccaatgaggccaacatctgttagtgaaagcttagtatcaagaaaggccgcataatcttcatttaaggaagctaggcctaagccaataattagaaaaccaagactgaaaatccagaaccatttcatttgtagaacttgtttactagtccagcccttaaattctttcgccttggccaattctgcttcttttttgctttcagctaattcagcatcagaaacgacgatttcatctttcttaggagttctaataaagcaagcaataactataccaattactaatagagcaactgcgaagatgaaaaatggtgccattgaggtcaagtgacctgtcttagtgttaccagtcataaagtgctttaaaatagcttgcgttgcaggttgtaagaaaatattaccaatcgaaccaccgcagaaagcaattcctaaagcagctccacgtccttttgcagggaaccagtggttaataacccaaggaacaccttggccggaataaaaagttgaaccgatcatacaaatgatagcagcaatatagaatcctggcagttttgtgctaattccaaagattatataggcaatagcagaaaggccaataccgattaaatacataagtctgaaattaactttctctaatgctttaccaataaatggcgaagcaactgaagcaaaaactgccccaaacgtaaagattaatgtatacgatgctaaggtaaagtgaaaagtattaactaacgggtggataaacaaaggttgaatattttgagcaatcccataaggaatggcttgggttaacatacaaaggaaaaccataaaatatttatagcctttgctaacgactttatctttagtagcgacatcagtagacatgtaattaccttctttctaaactaattacttatctaaaataatatttggtttgctgacgacaatatttttttgcatttgcttaattttaatagctgcaaaaattaataatataaaaccaattgctacaaagaaaatagtgcagcaccaagcagttgtgaaactggtagcgccttttatgacgccaaatagtggggcgccaattgcaaaaccaacagcataggccaggctaatgtaacctaagttaacaccttgagcttttgcaccaaataaacttttcgacataaatgcaggaccagacatatagctaaagacagatagaccacttgtaaaggcccaacccataccagcgtagaaattaatgcgatcgccgtaaggatgaaggctaataaagatcatcattaggatagctataattaacattattcctgcatatgccattgattttgctgtaccgaacttatcaaataaataacccccagaaatgtttccgatgatgccagcaagtccaaagactgagccaattattccgacctcagttaaggataatttagtatcaagaaaggccgcatagtcttcatttaatgaggctaggcctaaaccgataattaaaaatccaatgctgaaaatccagaaccatttcatgtgtagaacttgtttgccactccagccttgaaattcatgggcttgcttttgagcagcttcgtgtcggttttgttcaacttcttgagcagaagctaaaatttcatctttctttggtaccctaataaaagctgcaataatcaatccaactactaatagagcaacagcaaaaataaagaaaggtgtcatcgaagttaaatgaccagtcttggtattaccagtcatgaaatgctttaaaatttcctgggtaataggttgcaagaaaatatcaccaatcgatccaccacaaaatgctagacctaaagcaacaccgcgtcctttaaatggaaaccagtgattgataatccaagggacaccctgaccagaataaaaggttgaaccaaccatacaaataattccagccaaataaaagctaggtagctttgtactaattccaaaaattacatatgctccagctgaaagacaaatacctatcagatataaaatcttaaagtttactttttgcaaagccttaccaactaatggtgaaactaaagaccctacaacagccccaaaggtaaaaattaatgtataagaagctaatgtaaaatgaaaagtattaaccagagggtgaacaaataaaggctgaattaattgggcgattccatatggaacagcttgagttaacatgcagagaaataccataaagtatttgtagcctcgactgaccaccttttgtctatcgtttgacatcgtatctctcttctttctgacaaaatactattagcttgataagttatatattattaaacacgtgagctttgactatagccacctttattgtggctcactaaatcgagtaaatcaaaaaataacgacctataatgttatttaataggcataataaaaagcctatctttttgagatagactttagaaaattatttttttacatatcctgcgatgtcatcatcgtcaaaatcataggttaacttcttatcatatgctttttcatatgcttttttcttttgtagataatcaatatcacgcattcttttggcattttgatcaactgttagacggtcaactggataaattgttggtaaaacgtgaagaatgtagcgagttttgtggaattcgctgctatttttctccatttcagggaggtcctgaatttctacaaaacaggaaataattggaacgttggccttagctgcgtagtagtaggcgcccttttgaagagggcgaggttttcgatagttataccacatttcttgctccggatagatcaagacccagccctttttatcaaagactttttgcaaatgcttaggaaattcacgccccaaatattggtagctttgaacaattggaattgcattaatgttgttcattagaaaaccaaagaaaccgggtaattttaaattagaatcttcaatcacaacataaagttttttgtgacatttgttggctaatttcttgattggaagactatcggtttgcttgaagtgattactggtaataattgcgccatatttaggtccttgagcccgcttcttatttttgatttgcgtgtgagccatcaaaattaaagtgtcaatattaataataccttgagcaataatattctttagtttatgactaaacttcttttgttgtttccaataatcgttaacgagtttgattctttcgcttttagtcaggataggatcgcctaattcgactttggcatgcatttttccctttttaacggctgttttgatgttttcgataacttgcgcgcgattttcaccaataatcataatttcaccctttcgccttttcttttaatttgagcccagttatttggatcaagtgccgtgctcgcctctttttcaagcatatgatctaattttgcccgattttcagctcgctcttgattagtatagttgtctaactctgattttaattcctcataaaaaggtgtgctagaggcatatttccagaaataatcattatattggacgtctttaaagtgccaaggtttgaaaaataaattatagtgaattagccctggttcaggaatgggggcggtattttcattaggcattgcgtcccaacgtggatcaagatgtaaaattcttccgtcaccaatctcatttaggtagtcttgatcaggagcaatacaatcaaagtgatattgctcaagtaaatgcataaagtgatcgataaagtgttcatccctaaaagctttagaatttaagactaacatcccagaattaatatatttctttggatcgagagctagaacttctttaatatatttcaccattttatctacatattgaatcgatgaatctgtacaagcggcgaatagattattacctaagtcgttattatacagtttagcaatgtcatcaacgacgactgtgtcactatcaatgtagattgctttatcatattgtggaaataagtcagggataaagagacgataaaaaatagacattgtgaaaaagtctgcccggagatagttttctttacgattttggatcggttttaccagtttttcatcaatatggaaaaatttaacgtgcacatggtcattagcaaaagctgcaagttgcttttggtgtttttcagacaggtcttgatttagaaaagtaactgtgtaatctttttgcggattagcatttttaaccaaggagtttagcgaaactgccgcatacttggcaaaatcatcactaatactataaaaaacagggatagtcatttttaagcctctttatatttttacagatgtcgttttcttaactttcgcccaagttacatcttcatctttgatttcatcaacttttttaatcatccaatcaaggtcggcacgtgcttttttacggtcttcatcggtgaagttagctaattgttcttttagttctccataatatggagactttttagcaacatcccagaagtatttgacatattgaacatctgcgaaatgccaaggcttaaaaaagagattataatggacaattttaggatttttaatttcatccatgtgttcattgggcattgcatcccactcaaggggcaaatgataaattttgtcttcacaaatttcgttcatataagcttgatcaggatcgatattatcgaaatgatacttttcaattaatgaatagaatttatcaacaaatttcttatctctaaaggctttcatattgaagagaataacgccgttattgatatatttttctggtggaaaaataccttggcattccttgatataaacttgaagtggcttaataaatctgattgacatgtctggtacactagcaaacatgttgtcgccgatttcggtgttgtagagttcagcaatgtcagtacaaataatagtatcagcgtctaaataaacagccttatcatactgaggaaaaaggttagggataaataaacggtagaaaatagacatcgtgaaaaattgtgctcgtaagtaattctcttcactgttgtgaatcggagctaccatttcatcatcaatatgaaaaatattaacatggacatttttagtagaaagatcttctaaatcttttttgtgcttatcgctaatgttttgaactaaaagagtaatggtatagtctttgttttgatccacatggtcaattagtgactgaattgaaacggccgcgtagggtgtgtagttgtcgctaattgtgtaaaaaacaggtatagtcatcaaaaaataaactccttatatattaaatgtttctaggcccgctttaattgtgacctaagctctacgtactgcttaagtaaatcatcatattcatgtaatttcaagacgctgtgcactcgctctatatcccatggtttaacagttaaagtatggaagtatggcttaaaacgaaagctagtcgtgaaatgttgaattttggtatctggtcgtaaacgatattgttcattgtagcaacgtggagcaattttcttctcagtagcaagtttatttagagcagactgatctggaagaagcatttttttatcactcattttttctcttactttggcaaataattgtgtttttttaatttcagccatgttaagaagcaagacgccggagtttaggtaatcaaaagtcttgtgggtatggatattgtgaaagaagaaccgaccccagaagtctaaaacaccgactagttcaatattagctagatcttgattataaaagtcgctaatatctttacgcacaataatatcatcgtctaaatataagatacgatcaggaatctgtggtagttggtccgcaaagagacgcagcattgcatatggcgtaaaacgagtttccatatttgcgcgtggaggttcttttttaaataattcagtacaatcgattaattcagcagtattgttaggatccttttctttaagcaattttttaattagattaaaagcttgttggttaaaagctgtgtatccctctgcgtgcatcgtcaaaatataaaagtgcaggggagttgatgtgttttttagtaaagacagcgttgtaattaaaataccatcttcggcatgagaatcgccgcaaaacataatattcatttttgtcctccaatttttcgctgctggtagcgataatattcacagttactcaattttgaacggttcttcaattgagtaaatatttgatcatgtagctttttttgttgcagttttttaggtagagaagtatctggaaaaaaggggccatcaatataaacagtaattctagggtgcttgctatattttcttttctggtaggtcgttgtcataacaaagcttggcttagttgtttgaactggaaagttaaaactagttgctggaaatggacgaatatcagtatagtagggccaaacatgagcttctggatagataatgatatgggcgttttccttaattagagtattaactgctttaagcagatgaattgcttgcttaatatttttgccaactggtaatcctccataaggcaagagaattttgccaattattggaattccccagtttgcttgattagcaattgcataataatctttccagccaaagagggttaaaggcataaagacgtcgttaaccatttgagtgtgatttgcatagacaaaatagccctgatgcttatatttaaataacttatctctccctattactttgacatgcattccgccataagtaaaaagataagcaaagccagtagctaaaaaacgcattaaatagttaagaggtgtgcgtttaattatttgataatcgctaggtaaggtaaaatcttgttgcttacttttgacaatgtcgtcagttaaagaattatagtaaataacattacgttgagatggtttagtattcatgatattaattataaaagaagtttaaaaacaaaataagacatcgcttcagcgatgtcttataaaatatgggtggtcaggggatcgaaccctggacccacggattaagagtccgttgctctgccagctgagctaaccacccaattggataaccaacagatactattatgccaaaaaaaaataaaaatgcaagaacttttttgccttttttaaatgcaagaagttaaaaacaaaaaagacatcgcttcagcgatgccttataaagtatgggtggtcaggggatcgaaccctggacccacggattaagagtccgttgctctgccagctgagctaaccacccaattggataaccaacaaatagtattatgccaggaaaagaactaaagtgcaagctttttttgcataagtttaaaaaaagtgtggaaaacagtataatatagttattaatattgaggaggcatcatttatgccaaaaaagattttagtcgttgacgatgaaaaaccaatttctgacattattaaatttaacttgactaaggaaggctttgatgtcgacactgcttatgacggcgaagaagcggttaaaaaagttgatgaatatgatccagacttgatgattctagatctaatgttgcctaaaaaagatggcctagaagttgcacgggaagtacgtcaaactcacgatatgccaattattatggtaactgcgaaagatactgaaattgataaggtattaggactcgagatgggtgcagatgactatgttactaagcctttctctaatcgagaactagttgctagagtaaaggcaaacctacgtagacgtgatttaacccaaaaagctactgaagatgatgaagataaaaatattactattagcaatttggtaattatgcctgaagcctatatggtcgaaaaaaatggcgaaaaaattgaattaacacatcgtgaatttgaattacttcattatttagctcagcatatgggtcaagtgatgactagggaacacttgctgcaaaccgtttggggctatgattacttcggggatgttagaactgttgacgtaactgttagacgtttacgtgaaaaaatcgaagataatccgagttcgccaacaattttagttacacggcgtggagtaggatattacgttaaaaacccatcagatgaataaggatcaaagtcactagtaatagtggctttttttgcaattaggacaaatgaagaaaataaaaagtgtattaaattctatcaattttaaaatcgcagtaatttttatgctgcttttattagcaacgattgaagtggttggtgcgtcttttacaaggcaactcgaacaaaactcaattcaaaattttgaatcatcaattcaagttccaaatattattactaaccaaatttctagccaattaagtagggctaattctaaaaaggctaatcagcagttaagccagattatctcaaactataatttgggcgatattagccaattaatggtagttgataataagggagtaattagagctgtttcaaatgtgaatgatcaaaaccgtattggacagcgaactagtaatgtagatatcaagagtgtactctcaaatggaaagcaagtttcaaaagttattaatgacaatggaaattatatggtgcaaatttcacctttgacttctgctaatggaactaatactccagtaggagcaatttatgttcgcgctagcttacaaggtgtctttaataacttgagacaggtatcgatttacttcctgattgcttcgctgattgcagctgttttgggagcaattgtagccttggttatttcccgggcaataactagacctattgaagagatgcgtaaacaagcattaagagttgcaaatggagactattctgggcatgttagagtttatgcgcaagatgagttaggtcaactagccgaggctttcaatactttatcagtaagaattgaaagaactcaagaaatttcagacagtgagcgaagacgactagataatgtcttaacacacatgacagatggtgttattgcaacagacagacatggaaatatcacaattattaatgaaacagcactcgattttctaggaaaaactgaaaaagacgttattggaaagccaataactaatttacttggattaaaagatgttactattcaggacttattaagtactcagcaagaattagttgttcgagttaatgataatacgcgcgatgaaatgattttgcatgctaacttttctttgatccagcgtgtaacggggtttgtttccggcttagtttgcgtgcttcatgacattacccaacaacaaaaaaatgaacgtgaacaacaacaattcgtttcaaatgtttcacatgagcttaggacgccgttaacaagtttaagagcatatgttgaggcattgaatgatggggcatggaaagatccaaatattgcaccacaatttctgcatgttattcaagatgaaactgagcgaatgattcgaatgatcaatgatttgcttagcttatctagaatggatcgaggagtagcgaggatggatttagaatgggttaacttaaatgactttgttaaccacgttttaaatcgttttgatatgatgctcaagtctgattctgataagatgcacaaaaagaaatatacgattaagcgtgaatttcctcatcaagccttatgggttgaaattgatactgacaagatgatgcaagtaattgacaatatcatgaacaatgctatcaagtattcacctgacggtggcgtcatcacagttcgcctattgcaggctcaaaagcacgttatcttaagtatttctgatcaaggattaggaattccaagaaaagatttaaacaaaatctttgatagattttatcgtgttgataaggcgcgttctcgtaaacaaggtggaactggtctaggactggctatttctaaagaaatagtagaagcacaccatggtcgaatttgggcagatagtgctgaaggagccggctcaactttctacatttctttgccatatgaagcaattagcgaggaaggagaaaactgggatgaggtttaaagataagttttctagaattgcattacgagttagcttaattgcaatggttgcactatcaattatcttgtcagctattatttggggttctgatgcacgattctcaaggattgaagagacatctaatcaaactcaaattaaagatttaggccaacgttctttaagagatatttatttacctactcaaactttttattttaaagataagcaaatgtatcaggtttacgatactaaaaataatcttccgctagagttttcaaaattaactcaatcagttaagccactattgccaatcagagtttggtctagtcaaagtaaatatgaaaagttattaaaaaatcctgactatgttcagttaacatatccggatcagataacgatttccttattcttaactaatgtaagaaaaactgatagtcgggaatttaatcgcttttttgtgccagctcgatccagtaagtatatttatttaggcaatgacgaaaactatactatttatcgagttcgtctaaatgatgtatcgtttgacaatttggtggaacatattcaaagcgctaaaacacagatgccagttacgcttcaaaaagttcatgatgattatttacttttctatgaaaaggatttaagtttaccaacatacagctatttaactaatgaagagtcagattcatactttgtgtatcgcttgttaggctctaataatcctacccagcatagttctggcgaaagcattacatattctaatggagtatacgagcggttgattgcggcaaaacatactcataattatgaatatgttgattatcaacaggatcaggttccgaagactattagtcgaaaattaaatgatagtttatattttgttcgtaaaattggattatctgagccagatttaaggttctttgatgctgataataatacagttatttatcaaaattatgttgaagaatatccgatctttttaccagggaaatataagatgcgggcgcaagttaagtttgcttctaatggaatgacaattaactttaatagcttagacttgcagattccaattccaactaatggtgaaaagaagacgcttattccgactaatgaagcgatggatgaattatatcaaaagggatatcaccaaaaagatattgagcgcattgttattggctatacagctaagtctgataatagtaaaaataaaaaattagtagatctagaaccagcctattatgtaaagattaataagcagtggaagaccctagatgaatggctaaatattaataatcaaattacaaattctagaaaggaggggctagtagatggactttaagagaattgaatggatttttttagtcgtatttattggaattaatatctttttgggtattgagctttggcaaacaccgacgcttttatctgctggctctactccaattcaaactgatattaaaagcgaaacgagtgcagatcagataactatccctaaagttgatgataagcaagatgatgggtattatttagctaccaaagtggacaattcttggacaaaaaaagcagcagcacaggtaaatcaacaagtagaaactaatacaagtgaaaatagtatttcagttaatttgaacaaaccaattactctgtcgaaagattccaaaaaagccctgaaagaaattattcactttaaaaataatagtcaaaacgtgtatgagggtaaagattatgtctatctttcagaattatccgagggagatgattatgtctttaatcagaaaacaaagtatggagaagtttttgcagcaactgctcgattgcacattattgttaaaaataatcaaattgtatcgtattcgcaacgctacgttagcaatttgaatccagtacgtgaaagacaaaatacaattagttcaaaggctgctgtaaattctttatacacttatagtgaattgccaaataattctaagattatctggttaaagcaagtttatactaaattgatcactgttcgagggagcgaaatttatattcctacatgggtagctgcgattgaaaacaataattctcatacgatgacccttaagcgcgtaaacgcatttacagggacaattatccaaaataatattgctgctgatgattcaaaggagtagagaaatttgaaagtatcagttttatcaagtggttcaacaggtaattctacattgattgagactccgcagcataaaatcttaatggatgcaggtttatctggaaagaaaactaaggaattactagcacaggtaggcgttgatattaaagatattgatatggtatttattagccatgatcatactgaccattctggtggattaggcgtattgatgagaagatatcctaaaatttcagcctatgcgaattcaggtacttggaattatttaattgaaagcaataagatcggtaaattacctgttgaacaaattaatacgtttgagtctggtataactaagacttttggtgatttggacgtgacaagttttgcgacgagtcatgatgcggcgcagccacaatattatgtctttacaagtggtgggaaaagatttgcgtgtttaacagatactggttatgtttcaagtactgttaaaggtgaaataaaggatgcagatggctatttaatggaatttaactatgacgatatgatgcttagaaatggcccttattcttggtctttgaaacatcgaattatgtctgatgttggacatctttcaaatgatcaagcagcagacaccttacttgatgtagtttctcccaaaactaaacatatttttttagcgcatcgcagccagcataataatactcagtatttagcgcatgaaacggctgaagacttattggtagctggggatgcaaatttaccagctgatgttaaaattattgatactaatccaatgcaagctggttctttaacgaaaatataaatttttagcaaataatttgacttgaattcataaaaaattcaaaatttgtgattaggctagaaatgaagagaaaaggagaaatttttatggcagaaaataatactaaacaccctactaagcataatgctttaattaaaactggtattgttggagtggttgccggacttcttgggggtggagttgcttatgcaggtttgtctcaagttaatgggcaaaatgcaccacaaacaagtgttgttccaacgacaaaagttgaaaagtctagcagtaaaaatagtagccagatgactaatgcctttaatacggtaaagaaatcagttgtttctgttgttaacttaaagagacaaagttcatcttcaagtagtgatccgtttggtatttttggctctgacagttctagttcttcaaagaaaaattctaagtctgatttggaaacttacagcgaaggttcaggtgttatttacatgaagtctaatggcaaaggctacattgtaactaataaccacgttgtatctggaagtgatgagattcaggtcattttaagcaatggtaaaaaggtaactgcaaaaaaagtaggaactgattcagaaacagatttagctgttttaaccattgatggaaaatatgttactcaaactgcgcaatttggctcatctaagaatttagagccaggacagcaagttattgctgttggttcacctttaggtagtgaatatgctacaagtgtaactcaaggtattatttcagctaagaatagaactgttgatgtaactaattctgctggacaggttactaaccaggcaaccgttatccagactgatgctgctattaatccgggtaactcaggtggtccacttgtgaatatgtctggtcaagtaattgggattaactcaatgaaattatcctcttctagtgatggtacagctgttgagggaatgggatttgcaattccaagtgatgaagttgtttctattattaatcaattagttaagaatggaaaaatcattcgtccaaaattaggtgtaagaattgtatcagttgacgaattaacagagtatggccgcaagaaacttggtttgcctgatagtgttaaatctggtgtctatgtagctagcgttactaagaatggtagtgcagataaagcaggaattaagtcacatgatgtaatcaccaagattgatggtaaagatgttgatagtgttgtttcactacatactgcgctttatacacataaagttggtgatacagtaacacttcaagtcgttagagacggtaagtcacagaatatcaaagttactttaagttaagtgaatattattaaatagagataaaaaagctatgattatgcgttttgtaagcggtgatcatagctttttcttaatatttaaaatgtgaaacgtaataaagttcgtctttttgaattgtcaagaactgaaagttatccagaagattgtgggaaaatgtggaaaactctgtggattgtgcataactcggtcaaagtaaaaataaatagtgtggaaaacctgtgaattgtgtgtaaataaaattctaaaattagctgttctgaacggctgttcaagttgattatgtagggaatagacccaaaagtttggacaattagtagtatttataaaaatgtggaataaatttgctaaaaaagttatccacttttttagaaaccacaatttattgataattaattaagtcaaccactaaatatagttttcgataatccacagctaggggaaaagtgatgtggacgctatgtcaattaggggataaaattaaaaactagatgcgtgaaaggttagatagttacaatgaatatcaaaattgtttgtgtaggtaaactaaaagaaaagtattttaaggatggtattgctgaatacgtaaagagaatggggcgttttgctaaagtaaaaataattcaagtaccagacgaaaaagcccccgaaaagctaagtcctgctgaaatggagcaggtcaaagaaatcgagggaaaaagaattctagataagataaaagataaagaatatgtttatgtaacggcaattaagggtaaagaaagaactagcgaagactttgctaaagagctagctgacttaactacttatggacattcagacattacctttgtgattggaggaagtttaggaacaagtaatgcagtaaacaaacgagctgatgatctaattagttttggtaaatttacaatgccgcaccaattaatgcggttagttttagttgaacaaatttaccgtgcctttatgattaatagcggtagtccgtatcataaataattattttataaaaaataagattggttgcagtaggattaaaatactactaaaaataagccagtctttttttgttagggcaattggcacgatgacatttcgtggtttatcttcacgatacccatgtgaaatcattccttcagcaaggctgtttgaccaagaaatagctgctaaaatcgctttaaaatataatgttggcgaataaaaagagagatgataatgcctcatgtctccaactaagcgaatgcgattaacttcagcatggattttaggaagtacgttgaatgcggctaaagtcccataggcgaatttactcggtagtttaaaattttgctctaatgagcgagcgagtgaaagaatactagtggtttcagtaaatgtagctcctaaaaatacataagcgtaaattcgtgtaaataaaacgctggcatggtagagactatgacctggagtaaagtaatagatcgtaataaagactactaaagctgcaaataatgggattaaaaagagcaagagtagttttttagggctgagatgcttaaacgtgagatagccaagactagctataataattattatatttccaaccaaattaggaataagcgatatttcaagtgaaataattaaaatcaaaaatagtttcaatccgggattcatgttgtttacctttttaattagtgtagaaaagtttctgatctttgatagttaagtgatagtcacagagatgctgaacttgtgcaagttggtgactaatgacaagcaaggtgtggttagaattaagaaagtactttttaagcaaataaatgacctctgagacgctttcttgatctaaaccactaaatggttcatctagaagtaaaacctcgggataagccattaacatgacaagaatttgcaattttcttttttgtcctccagatagagaataaacaacttgttcgcctaaattttctaagttgagttcagtcagcaggtgcttgagctcagttttattcaaggaagggttttgattgtgttttaggctaaagtctaattcttcctttactgtaacatttaagaattggtcatctggattttgaaaaaattgtcctacttttgctagatagggatgccggcgccatttcttaatgtctttacttttaaatattaattgtccttgatacggaataattttggttagagctttaaataaagatgtcttaccgcttccgttttcgccagttaataaagtggctcttccggagtagatttttagatcagttggagaaattagttttctttctggaaaagataatgaaaatgattcaagtgaaaatactggattttgttttaagtcaggaagagagaaagttaatgcttgattttttagcgtgttttcaggcaaagtaatagttttaatatttttgtctttgatagccaagaccgtggaaactagcttttcatagccagagaaattatggtcgctaattaaaattgtttttccttctttgtgaagtgcagctaagcaagttagtagaaacttccgattatgagagtcgcaattagcaaaaggttcatctaataaaaataagtcgcttttcatggcaatcaggatagctaaggcaacgcgctgcttttcaccgcctgaaagctgaagaaaaggttggtctaataaagatgaaatattagttctagcacttgcgtaattaatacgctttaaagcagcagtacgatcaactagttcattttctaaggcaaaaattagttcttctcgaggagtcgccatcgtaaattgtcggttagggtcttgaaataccatgccccaattagtgaaaggctgttttaaagaaccagcagtaattttgccattgaaagttgggtcaaggccggagatgagctttaacagagttgatttgccactaccggtttgaccagtcaatagaacaaaatcaccttgatttatggttaaatttaaatctttaaaaattggctgattttgatattgaaaagatagctgattaattttaatttgtttggacgacatgggcttttaccaagaggttaatgatcaatttaactaaaacgcaggtaaacaaaagcattgaaagccaacgaactacgaagtagaaaatcatgttaaaagttgaaaaatagctatagccattcttaatgaagtcatacaggtaggtaacgattgttgtcgttgtagcagataagaaaagggtgaaccagttgtagcgacggtagctagtaagagtaaaacctaattcgctacctaagccttgaacagctccagagatcagatttacggctccccattgttctccagcgataagttcaacgcaagaacctaaaaattctcctagaaatgcagccccaggtagtcgaactaagaatcccgctaaaggacctgccatacaccagattcccatcataatatcattggctaacattccataaccaaccggtgtaaggagcgcagttaagacattatagaggccgtcactaactaagtaaataaagccaaaaataatagcaattaaagcaattaggataatatctcgaacatgtaattttttcattttttcctcccgaaataaaaaagccacctcaaagaggtgactaaataaaagtctaaaaataaatcattttccctacgctgatgttaatcaaacaggttcaatgggtatattctcagccatctggcaccccagttatatttctaggtttagcttacgcttaataagccgaaatgacaattaaaaatagcaaaaaggttataattaaaatagagtgaaagcaaaggggaccggttgagatggcaacagcgacattaaaaaattatttatcaagtttaatgcagaatacgcaaggtactgaaatagagatccgtactgaaaatcttcttttgccatatagtctttatttagaaacagtgcattatgattttactgaatatcaatctagtactagtcaattaatttactgctttgcgggtaagtgtgaggttgaaattaataataaaactttttatttgacggcaggaaatattttgctaattgaaaaagacactgactatataattaaagttagtgataaaaacgcaattattgttaagtttaagctaaagagtaatttttcatggcaaaaacaagtagaacagttagatgccaatacacccaccgaacaaagattgagcacattatttttaaaaaagttaaatcaagatagtgcttttttatttacaactacctctgtaacgtggggtagtcaaaacttgaaaggtataattcaagactatcttaataatgtcgcttttaatggaacaattggcttagagctacttaaaattataatcttacgcaatttgcgcgaacaaaactttaaagcaaatgaagtaaaagaaagtacatttaaagatgaagcgttagatcaatacatcgaccaacactataatgatattagtttagcgcaagctgccaaatattttggctttaatcgtaattatttttctacaatggtaaaagaaaaaacgggaaagagctttgttgagcatgtcgatgaaagaaggatgaaagaagctagaaggttattggccaagccaaatgtttcattaaaagaaataattgaaactattggatattcaagcaagtcgtttttctataagaaatttaagcattattatggcatgactccagcagaaatgagaaagagactatttagagaggctcatatcaatttgaaataatagagtacacaaaaagggatgccttgtgcatcccttttattacatgttttccaatctcttaattctgtctgctgtaggcggatgagtatcaaataatgagctcaagccacgcttatgaaacggattttcgatgtataaaccagcgcttgacggatctggatctttcattggctcgctatttgaaatcttttctaaagctgaaattaacccttgagggtttctagtaagctcaactgaactagcatcagctaaatattcacgattacgtgagagagccatctgagctagtgcagcagcaagaggtcctaaaattaatgtgaaaacaatggccactattttaaaaattgtttctagagagctagagtcatcgtcatcacggtcagaattgccgccccaccaccaaatacgggacgcaaaactagagataaatgaaattacagcagctaaagctactccaattgtagatactaaaatgtcataatttcgaatatgagaaatttcatggccaagaacaccctctaattcacttcgattaagtcgctttcttaatccagtagtaacagctacgaaactgtgcttaggatcgcgcccagttgcaaaggcattaggactttcatcgttgataataaagactcttggcattggaacctgtcccgcaagtgccatatcttctacaatatgccacaattctggatcatcttcttcatgaatctctcggccatgattcatgctcatgactaaatttcccggattttgaagaacaataaaaagataaattaagctaccgattagggcaattacaattcctgatagcggttcaccgttaatcaaatatcctaacccaccaccaacaagagctagaataataacgaatataacaagcaaaaatgctgttttacgcttattgcgtgctatttgttgatagagcattgatagacctagaatttaactttaggcacagctttttcttcagttggtgtttgaaggtagtccatattcttaaagccgtgaatcttagcgactaagttagatgggaaagttaatagtttctcgttaaacatagcaacagttgaattgtataactgacgtgaatatgcaatcttattttcagtgtttgtaagttcttcttgaagtgacatgaagttttgatttgcttttaagtccgggtaattttcagctagagcaaaaatactcctcaacgaatcagtaatttggttagaaagtttaatagcttcttcgtgatcggaattaggaatatttactaattgatttcttagagcaactactttttctaaagtgccgctttcatgtttggcataacccttaactgtttcaactaagttaggaattaggtcgttacgacgttttaattggacatcaatttgactccacgcctcgtcagcatgaactttagctttttgcaagccattgtagataccaatataaacggccaccagtaaaattaaaatgataataataatccatgttaaagtcatagaaataaatcctttctattatcataaaaatatggttagaatgttaggaatattgtaccaaataaagaaagcttagaataccaaaaaagcgcaaaattgcgctttttttatgatatttaaataacaaaatctaatactatccaacctagaactgtcaaaataattaaacctgcaaattctagaactgaaaatacccagaaaaactttcgttttgaaacagttccgttttcaacaaaactcttgaaaacaagcatattggccattgaaccaacgattgaaccgaatcctccgatatttaagccaaggaataaggcttccgcaaagttagtaaatttaccaattaaaattgttgaaggaacgttagaaatgaattgactggaaataatagaagtcaagaatacagaatgttcggagaacattgtcttagaaattaaagtaacaataaatggaatttgctggatatcgctaataaaaatgaaaaagcatgtgaaagttagaagtagagcataatccacatgtaacataatagaaggattaataataagagcaaggatcactgcaacaattgcaggaacatatgcaggtacaatattgaaaacgccaaagaagaagaaaattgaaacagcaatcgttaaaagcattggtcgaatgctgattctaatgtcttctaaaggcacagtagggattggcttatctttaacaaaaaagataaacactaaaacaataattaaactaactagtaataatggaattgaccaactaaaaaacttaattggtgaaacattataacggttaacaacaaagatgttatgaggattcccccatggcgtaaaagcagcgccaatatttgcgcccatcccaattaaggtgacaggcaatatctcaggtaagtgatggcgtctagcaatcgttaaatataacggtataagagttaaaacagttatatcattagttaaaaacatcgcagagataattgacaaaattgtgaagattgcagttaatcttcgagtactcctagcgcttgcagttagtttataggccaagacatccaaaacatgtaagtaagaaaaaatttggatgattgtaagcattgctagaattgagtaaagtgtatggaagttaatatcttcaatacgcggtcttgcgaagaataagcttatgatcgttatgacaaccgtaatttgtaaaatacggtctttagcaatatttttgatgacggtcattaaggtcccctcttaaaattaattcaacactactattttgaactctttacggcaagttcgcaacgcttttttcgcattagtccttcctattagtaagattttgagcattttattaggaaaaacggtaattaacctgctatatttaagttagtaaaagaggacggaggaaaataaatatggttgattccaagaatcttgaattaaaaattaaagatagtgctaaagaagttttagaaaagaaaattaagccaggacaagtcgttttgctggctttaaatgatggttcaaatggctattctaaattaggtggaacttgtacaatcggtgctaattttcaactagtgttgctagatcataaggatccagaattttcaattaaggttaacaacaacatgggtttagatatgtatacatctgataaagaattagcctttttagacgatggtttagttcttaatgctcgtaatgctactctatccttatcttctaatgaaggaatcatcgatggcggagttactatttctgaattcaaaggagaaaaactttctgctgatgagatgaaaaaattaggtggaaagatctgctaggtattgaagtgacgtgcttcttcgtggtatgataataaaagattttcgaaaattttatttgagaggaagtatagatctatgcgtaaaggtgaaaactacaacactggtgttacaccaaacttaagacctaagaacaagaagaactctaaggctcgtgttaagagagctgctgaagtggttgctttcttaaacaaagctgctaaagatgaaaacaagtaattaaatttactgcataagataaagagagacgctggttagcgtctctctttttttgcatgtaaaagttatataaattctaatttatttaataacattttgttgtaaatgaatttatattattatataaaaagccttataaaatatgaaaaattgaacataggatagaattttagatgaataacatttcgagaaaagggctagaagtaaaggcagtttttgcccttgttttaccctctctttttttaggactagcaagtaacttttcccgcaatatttttttaggagttatgctgctcttaattttgggagcagtcgtcggcttgagcataccaactattgttagtacctggcttattttgattttgactgtactagggattagctctctaactcttggatatgcggcgatagatttttatggaaagaccctgctgcttatttcttttcccttagaaacatatttaactagtcaaattaaagagtgcgtttttagatggcaaatatttaagaaaaatcagtctagtgcttaccgttatcttaagcactacgatcaaaatgtaaaattacaaacgacatataatgcagagaagttatataaaaagattaagagaattttaacggagaaaaattatttaccattgtggtgtgattttacgattattgattgggaacatgatcagcagtttgcgcaatttaatttagaagatcatgacaaaattttgcagcaaatagcaagagtacttaaaacaagtagattagttgatgaaaatttatattacctgggaaatggtcagtttctaattatctctaatacgatcgcaccaggtacattaatggttttaaatgatgaactaaaagctgagttaaaaaggctacagtatggggaatatcagcctgcttttaaaatggcaacgcagcacattacagaacaagattttcttgagtatcctaattttaatgcaattcttaaacgtctaaaaagaaagcttgaaacggacttagttgttgaatatttaaagggagtagaagcatgagtaattggttctttttcttggtaattttggttactttaacatttctagtggcattttttgctatgtttcgtagcctctggactatttatcatcaaactgagcatacagtgcgtcatttaggaagaaagcataatgttaaatgattttttagctgtttcaactttagtttcaatttggttttcgcttttagcttcgttagttactctttatggtgcaactagtttttggcttaagcatagtaaaaaagtcatttcaattacgccactaaagcattaccccgcaattacgattgttgttccagcacataatgaagaagtggtaattgcaaataccactaagggaattcttaacttgaattatcctgcatcaaaggtcgagctactcttatatgccgataattgccaagataaaactgcagctgaaatgcgtaagacggtagatttacctcaatataaatacagaaatgtacaaataattgaacggcgtggctcaggcggtaaagcaggtgtcttaaacgatgccttaaagatagcgcagggagaatatatttgcgtttatgatgcagatgcattgcccgagaaaaatgctttatattttttagtgaaaaaagttttagagaatccccaacgatatatggcaacttttggcagaaataaaacacggaatgcgaagcaaaattttttaactaaatgcattaaccaagaagttatagtgtctcaaagacttcaacatgtaggtgtttggaatttatttaaaattgggcgaattccaggaaccaatttcatcatcaatactgaatatgtaaaaaagattggtggttggcaaagtggcgccttgactgaagataccgaaatttcttttcgcattatggaagatggctatttgattgctctagcgtataattcagaggcttttgaacaggaacctgagcatttacgtgattattattatcaacgattacgttgggctaaaggaaattatcaagtagtgatgaataactttaaacacttatttgatactagtaactggcgtgtaaagctagagactttttatttagcatgtactttcttttggtttaatttagctgttgttctttcagacattatcttttttgtggatttgggatgtataattacaagatttttcaatccagaaatcccaattatctttgcaatgaattctaatattctcttaatgcagctactattaattaactggctattaatgatcttgctctatgtaattcaaataaatctcgctttagctactcaatatggtcaagcaactagtgatcaaatctggctagctttagtgtcatattttacttattcgcaactcttcattgctatttctctgcaagcagtctgctcagtaattggagataaggtgtttaaacgagatggtactaagtgggtgaaaaccaaaagattcgcagattaggaataagagatgaaagtaaagaatttaatactgattttaggaactatcattgcttatttaggaatcatcgcctatgtgaggatgagcaatgatcgaacgctagaagagcgatgttatcattcgtggcgtgaagattatataaaaaataaaaatcaaaatgagcaatatgtgaatgcagcaggaagaaataatccttcatttgccttatctgaagcacaaggttatggaatgttactggctgctaaagcgggagagaaacatttaggaagtcggattgattttcaaaaactagataattattacctggctcatcgcttaacaaattcaaatttgatgagctggaaacagaaagatagaaaaaatatttggcgtgataatcctgtgagtgcaagtgatggtgacataataattgcgcaagctttgctgcatgctgatagagtttggccaggacatggttataagtcacaagctgttaacttaattaatgatattaaaaggcttgaaatcaatcagaaagctaaaatggtaactgtcggaaactgggctaataaagattcacgcttttataatgtactgagaacatcagatgtaatgccaaaagcgtttgaagaattttatcaagtaactggggatcaagcttggctaacaattaaaagaaaaatgcttaactatttgcaaaagttaagcaagaagtacaatactggtttagttcctgattttgcctggatttctaataattatgttaggcccgtacaagctaatgaagtggcgattaatgatgatggtcactacagtgcaaatgcttgccgagtcccaatgttgttagctgaaagcaatgataaagaagcagctcaagtagtaaagaagatgctaaaattttttaagaaaaaagggacttcagctggttttaccttaaaaggtgaaaaattacatcattatcaatcagcgagctttagtgcgccaatctttgtagcggctagtaagtatcgtaatcagggttatgatactttgattgaacaagaaaaatatatcttttcaagaccacttccgaaagataactattacgatgctactttaacggttttagctgctttaaatacaaatgagttgacgggattagaaaaatagagaaagattaagttgttgaatctttctctatttttgatttgcaagagtagaacggttttgctatgatagtagaaattttagacatctttatatttctggaaggggtaagtttttatgggattaaatgcatatattcaaggttttaatagtttagagtcaatcgatcgtgcaccaggttattttaaatatcagcatcattctgtcgctgatcatagttttagaacagctgaacttgctcaaatgatgggagatattgaagaagttgttggtaaacaaaaaataaattggaaagccctctatgaaaagagtcttaatcatgattataccgagcgttttattggtgacattaagactccagttaaatatgcaactccacaattgcggaagatgattggagacgttgaagaaacaatgactgccaaatttattaaggacgaaattccaaaagaatttcaaaaaatttatactaagcgtttgtctgaagggaaagatgatactttagaaggtaaaatcttatctatttgtgataagttagatttactttatgaagcttatggtgaaattgaattaggaaatccaaatccagttttcatgcaaatgtttaaagaaagccttgaaacgattaaaaaatttgacgacttaacttgcgttcaatactttattaagaagattttgccagacttatttaaaggtgactttgctggtaaagataagatgcaaagaattgcttttagtattttactaatgggggaagaatagtttgaaatttcagtgcgcatcctgtgggttgcgacttgacagccttcattttaagcaagaaggattaatgaatcccaagttaacaagtatttgtgatatttgcctaacacgcaatctaaatgcagaagattatgaaaatccagtaattgagaatatttcccaggtaatgctctatggctttgtaggaaagaaaaatacgggtaagcttaatctagagtctttaaatcaatatcttgtaggaagcgatcatagacgccaatatgaatcttttattcaggattatgatggtaatgaagtagctctccagcaattgtcacgatctgaatttaatcaggcaattattaagagcgaagataaagaaataaattatattcctaatagcaatgttgattttgcggttaatatgaaaaacatgggaattgaagttgacttttctttaaatgaagtcgattttgttgaccgtgaaagaattcgtcataaatataattatcgctgccaatattgcggtagacgcgggacgagcgtagatcacaaagatccagtttctttatcgcatgataattcttttgataatctgattttgtcatgtagcgagtgtaatcgaattaaatctaatatgccttataatttgtttactaagctgaataatcaacttactgttgtaaatagaaaattggttaagtacgaagatactcttgctaatttaaaagaagaatttcagcaggcaaaacgtgatttggctggacaagttcatttaaaaggggtagttaatgaccctgaattaaatgcgatgagaaagcaaaataaaaagcttcaggatgcaattgatagtttgcagagcgattatgatgctttaaggaaattgcgtaagacatattttgaaactggttggaaactagcacaagaaaaagaaaatagtgagattatatagtaaaaaaatgcattggacataaaaatccaatgcattttttgctatcttaaagttcattacttctaaagttacgtaagaatttcttagtcttctcttcttgaggatcattaaagatctcttgtggtgtaccttgttcagtgataactccatcactcataaagataacttgatcagaaacgtcacgagcaaatcccatttcgtgagtaacaatgaccattgttaagccagttttagctagtaactgcatagtattaagtacttcaccaaccatttcaggatctagcgcactagttggttcatcgaaaagtaagatttcaggatccatcgaaattgcccgcgcaatagctacacgctgctgttgtccaccagataattgttgaggctttgcagttaagaaaggttccatgccaactttctttaagttctcaattgcaacttttttggcttcttctttagagcgtccaagaaccatttcttgaccaatcatacagttttgaagcacgtttttattattaaataaattaaattgctggaacaccataccaacctttgatcggaatttattgcgatcaaaatgagaatctaaaatattgttaccatggaataagatcttaccattgcttggttcttcaagaaggttaatacatctaagcatggtcgatttaccaccaccagatggcccaataatggtcattacttcacctttattaatatcaaaagaaatatcttttaatactgtgtggtcgccgtatttcttttgtaaatgttgtacttgtaaaatgttttcttcgttattattgttcatgttcaaatccagtctcctttggatcttctacttgtaattgattagccattaagttgtagttctttggaccttcaagcttcttttcaatgaaattaaagattctagtaattgagaatgtcaaaattaagtagatcattgaaataatgaagtaagtttggaagaattggaaggtttgactggcaacagttgtaccaacaaagaacaattctgatacagagataatacttaatactgaagtatccttaatgttaacaataaattcgttagtaattgatggcaaacagtttctaattgcttgtggtaaaatgatatgccacatttgttgtgagtgagtcataccgatagcagaagctgcttcaaattgacctttaggggtagcgttaataccaccacgaataacctcggctaagtaagcaccagtattaattgaaacaattactagagcagctactgtacggtttaagttaaggtgccataattgggcaattccgtagtagataacagctgcttgaaccatcataggagttccacggaacacttcaatataaactgctaaaatccaatcaacaatctttaagccccacttcttaccagtagacttaggagttgggatagttctaacaatacccacaagtaaaccaatgaagaaaccaacaatagtaccaactaaagctaaaagaagagtcattccaacaccgccaaggatcattgaaccatagcgatgcataattgacataaaccagttttctttcttgctgccacctgcttgaggctgttcctttacagcatcagccattaattggtcgcgctttttcttagaaataccatttaaaatgctattaacttggttaagtaattcagtgttgcctttcttaacaccaattgatgtaattgaatcatcgtggtcaactttgaatccttgcatcttgtttaagttaacggcaacgatgttagggttaactgccttgtaactttggtattcaatatcttctgctacataaccatcaatagtacctgattgtaagctttgacgcattgcagaaaagcttctcattgctggttcacgcttagcgccatgtaattgcttaattagatcatagtgcaatgtaccttgttgagcagttaattttgcgcctttaaaatcatttaagccttttgcttgagcaaattttccagtcttgcttgtaataactacgaaagtactctttctgtatggtacagagaagttgattgcctttctacgttcagcagtaggagacataccagcaataattaaatcaattttgccagaagttaaagctggtaatagaccatcccattcggtcttttcaacgacaactttacgatgaagctttttaccgataatttttgcgatttgtacatcatatccatttgcatattgcttagatccatcaattggaactgcaccatttgcatcggttgtttgagtccaattgtatggtgggtaattagcttccatacctatttttaggggtgcttcttttttagccgcttcggtttgactagaattagagctaaaaccgataactaaacttaaaattagggctaataaagcactaaaccatcttatttttgacttcactttgaaatacctccaaaaattatttcaaataaagccaatacaataaaagcgtaaataaaaagcctcgctgtttaccaaaaacaacgaggtttgaaaatcatcagtaattaaaccaaatcatatagcgctccctggggactaccaggacagtatgtaagatatgctctcacatcccaacaagcttaattcgcgaaagtaagcttgtttcggcgataatcctaaaaactactgtcaatgtattcgcgtactcaagtagattttgtggttatcgcaacctctattgcattggggatttatttaactgatgaaaagattaaacgatttttaatattttgtcaaataaatccgtgattttttttgacatcttttttcttaatatctgaaacatagggattaccagcaactataaatcttagctttttcttggcccatttaggatctgactgattgatcccaactcttggaagagcagtaattttttcaatttttcgtttatgattaatatcaatatcaaaaggagaatcttctaaacgagctaagtcccattttctactagtaattccaaaagcctgcatcatctttccagggccattagttaaaagtggaccagttttgccgttgcgatttttaatcatggtatcaattccggtcagtgggtcaattgccctaattaaaactccttgtggttcaccttctgcttggcacgcaacatcaaagaagaagtattgtctctgagaatagatatacaaactgccaccaggacgatataagccttcatttgcctgactgcgtctgccaccataagaatgggcagcccggtcttttacaccaacataggcttctgcttcaactattgtgcctgataaaagttcatttccattgttgaaagataaagttctacccaacagatctttactaatttcactagtagaccgattagtaaaaaattcttcatagttcatattactacttctttctaaaaatgttgtacactcgtacttgaaagtaaatataaattgtagggggaatcaaaagatgaatgaaataaaagttgttagaatttatgaccatgagcaacccgcaggttatagaatcttagtagatcgcttatggcctcgaggaatgagcaaggtaaaagctcatttagatgaatgggataaggaaattgggccaactaatgaattaagaaaatggtttaatcatgaagatgacaagtttcctgaattcaagactaagtatatagcgcaattgaaagctaatccagttacaaccgagtttgttaaaaatgtaaaagaaaagctagctcaagaagacgttatcttcttatatggtgctaaaaataaaaagcacaaccaggcagttgtgcttaaagattttattgatagtcaattaggttaaggcatttttttgccatgcaagttttgtcgaacgtaatgaaaaataattgttaaaataactgtaccaaaaacgatgccggcaaagatggcatcgggcagtttgaagtttagcggtggcaatgaaacaagtagcttaactgcaatgattgtgattaaaacataggccattgtttgaagttcaggaataatttccattaatttgataataacttcagcaactcctcgcatgcatagaataccaatcattccgccaactaagacgacaactggattatttgacatggctaaggctgctaaaacagagtcaattgaaaagacgatatccattgactcaattgaaataacagttctccaaaataatgaaagatggtgctttcttgtcttggagctctttttcttatgggcttctttttttgccgcttctttcttagcaacttgtgcagggtggcgaagatcataaaaatacttataaactaagtaaagtaaatataaaccgcctaacagtttgatttcccagaaattaattaggtaagtaccaatcccaattacaataaagcgaaatagataagccccccaaagtccgtaaactaacgatttcctttgctcatctttagttggtaaaacttgcgtttgtgcggctaaaaccaccgcattatcaactgatagcaaacactccattaaaattagagtcagaatcatcatccaatcttgtccgctagttaggacatgagcccagttattagcgtcaaaaaagggttgataaagtttaatcaattgcattcaaatagccttcttcaagttttattaagcgttgcttttctttctctcccattctataacttccaaccttatctgacgctaaaattacgcgatgacttggaataaaaattagggatggatttagggctaccgcatgtgcaactgttcgaaccgaagttgagccattaatagcagaagctaaatcattgtaagaaatggttgttccataaggaatattttcaatcattttaacaacttgattttgaaatggagtaccaaagcttgagtagtcgataggaacggtaaaggagcgacgcgtgcctgcaaaatattcttttaattgttgaacataaggagccaattttttggaatcttggaccagaatgtggttaggataaaatcctaaaatagaagattcaatattactattcttggaaccgacgaatgctaatcccaagttactaatgactaattcataggtccatggcttaatttcaacaaaatcgtaataaaaaacttttgcttgggcaagtggcatttaatcctaacctttcttttaattaatatattaactccatcttatattgtacaacaaaaaataacgaaactgtcaaattttttgtgtaaatagatttttctcgtagattgattttttaatcttttatttaatcaaagtaggattctaaggtatcctgaacctgaccaaagcctttgtggattcgattgaaatagcgttcgttgtagctcattgcctgaatgccaataaaagtattaagcgactgttcagttggaaactctgctttaggcttagctttacgcttgataacgttgttaaaggattcgatcatattggtagagtaaattgaagccctgatctgcttaggatagctgtaaaagactagcagatcaggttcaatctctttgagatttctgatgacatggttgtacgcgctgttccacttgtcatagaaggcgtgcaagactttgatcgcggcttccttatttggctgttgatgaatttgcttgaattcattcatgatcgtttcgcgatcatctacgcgtactttagcgcaaatattgcgcatgacatgaactagacagcgttgaaaatgagctttcggataagtctgctccagcactgtcttcatgcccacaacgccatctgaaagaaagagctcaacctgttctagaccgcgagacttcatgtcttgaagcatttccgtccaattctcgacgttttcgctgggagcaatgcggtaatcgatgacttccttgtgaccattaggcttgatgccaatggcaatataaactgcttcacgatcaaaggttatgcgacgcaaaggaatgtaggtagcgtccaaataaacgcagaagaacttgtcactgaatttgcgctgatgataggcctcgacttttggaatcatctgcttggagatgttagatacctgagctgggctgtaatgactgccatacatcttttcaatcaagtcggctatttctctagtggttacgcctttggaatatagcttgataatcatgctttccaagacattggagtgctgcttgtagtcagggagcgtgtgctgatgaaacatgccgttacgatccctaggcacctgaattttaatctcgccaaattgcgtatcaaccttgcgaaagtaagcaccattgcgtgaattgcctgtattccagccagctctggcataaggatcatagcctaaaaacgcagtcagttcagcctctaataggtcattaactgcttgctggagttctttgcgcaataaatcgtttattttgtcttgattgaatagagcttgtgctatatttttggtaaaatcattcatgaaggagttcttctttctgtatgtgtttttttgttcaaaccaatcatacgagaaaggaactcctttttctaatgttttaagaaataaatttaaggaattattcatccttacacaaactattttacagtctcaaaataacagaaagagctatggacaaattaaataaaatgttagttaagataatatcagttatatatataatttttcaaatactttttcagaattttcaataattgttaaaacatctttaggagttggtacaggagtattattgataacccagactttggcagtagcttgtcgataggcaagaagttgagcgaaaggataaacaacaaaactagttccagcaataataactaagtcactattttgaattgctttgactgaatcagttaaaaccatttcattaattggttcaccgtataaaacaatgccgggacgaattattccgtgatcttttgcgtgtaggtacgatttcttatattcttcgtatgaaattttttcatgacacttagtacaaaaaatattataaagattgccatgaaattcaatgacatgcttattgccagcttttttgtctagaccatcaacattttgtgtaattaaagtaccatttttattgcagctagctgcaattttttggtgaataatattaggttgagcatttggaaaatacatattttccattacaaagtgatgaaacttagctggttcatgaaagagagtatcctcacttaaaatttgttctggactttcggatatgccattataaattccgttttttgatctgtagtcaggaatatgagagggtgtagaaactccagcaccagttaagtacgtgacatggtgggcattattgagatctgcttgcagggcagcaatttgattgtttaaatccatatgaaacctcctatacttttaattttcaactaagtcaattatagaatgctgagagaaaaagtggtatttgttataattgaagtaagaattttaacgttaataaatatttttagaaggaaagatatgtcacttttgtatattgcttttgatattttgctaattggctatattttttatagttggtattggcaagcaaacattgattataaggctcgctttagaagttcatcggttatttgggctttgatttttctattaattggattttatttagattactttactgatccaactttgctcatgaatgtgtttatagcaacatttttattaatgagtattattgatggtgttagtggattagctaagaagaggttagttgtaagtggatattttaaacgaacagttaagtatagcgatattgcacatgttaccttaattacagttcctaatcctaaaaagcccactgtgatggcaatttttcaaactaataatcgtcaagcgtattatttacgtttttcacagcaaattagtgatgtaattgctaacattagaaaatacttaggttcaaacgttggcattgaagtacagtcaatgatgtaaatataaaaatatgaaaagaaaggataagaactctgatcactatacaatgaagtgaaggagtacttatccttttttgctttttataaaattggagaaagtaatctagaaaaggcctgtttgaatcgaaggtaacgagaccaattattggtgatatccaacgttaattcagtacagttagcaagatcttttttaaaaatctgatttaattcccgggtaatatttttatcatagaaaacagcatcagtttcaaaatttagactatatgagcgaaagtcttgattcattgaaccaactgctgaaaagcgttcatcaaccatgacagtcttagcatgaatgaagccattattatagacgtaaatttttatcccttcatgtaataagtagttcgcataccactgagtagcgcggtaaataaagggatgatcaggcattgaagggatcatgattctgacatcaacacctgaacgggcagcaataacccaagtggcgatcattggatcgtctggaactaggtaaggagtctgaatccaaagcgtttttcttgccatcatcatcattctaatcatgccattgcgtaagtaaggggtagaagtatcaggtccatctgacacgatttgtgttgcaacgtcatcttcagttagcttattttcttcaatctttggaaaaagtttttcattaaatgaaattgtctcatttttattagtaactgaagcgttccagtccattacaaaacgttcttggagtaatagcgaggctgagcctacaattctaagatgggtatcgcgccagtaaccaaattttttgcttttacttacatattgttcaccaacattgaagccacctgtccaagatattcggccatcaacaacgacaatcttacggtgaaggtgataattcatccgatattttttgatcatattctgagccgtgataaaagctgccacttctccgcctagatcagttaaaggtttgaaccaagcctttgaagcacctggcgatccccacggatcataaatcaatcttatttttacgccttcacgagcttttttgattaataaattgagaaactgatttcctaaatcatcattcatgaaggaataatattcaacattgattgtttccttagcctgattaatgtctttaaaaagagctttaaatttctcttctccatcggtatagaaactaattttattgtttttagaaagcggggaatcatgtttaaagttaaaataatcaattaaaattttagcttctttagaagtatctgttggcccagtatctttagggatacgcggaatcattttatttactttgtttaagccaatgtgtttttgattattaattgcaaaaaggttttcttgtgataatccacgtccaataaaaccgtaaagaataaagccgagcacaggaaaaataagtaaaataattagccaggcccaagaggtagcgactgatctttttctgtggaacactacataaaaggctaaaagtgtgttaactgcccaaagaagtgtccaaaattcatttgaaaaaataattatccctccccgttaactcagttattatcgtcgttatgtcctccaaaaataagaagaagtctaaataattgtagcatgcttgttaaaactgctgcgacataggttaaggctgccgcaaacaacactttgcgtgccattggcatctcttgtggcgataaaatagccccattatttaacatccttaacgcacgatgtgaagcattaaattcaactggtaaagttactacctgaaaaagaaggactagtgcaaagcaccaaataccaattttaatcaaggtttgattcatccctaagactagtcctagaagaattaatggcattgataaattagaaccaagagaaacaattggcactaaggcagaacgcatacgcattggtgcatagttgctagcatcttgtaaggcatgtccgacttcatgtgctgctacaccaaccgcagcaatagaagaagagttataaacagactgcgaaaggctgagaactttattagtaggattgtaattatcagttaagttcccggcaacttcgcgaatttcaacttcatataaaccagcttggtctagaatgtaacgagcggctactttaccagtgtaattaccttgattttgaatttgatcatagcgattaaaagtcgaattaacgttcattgaggcccagccagaaattgctacacctaaaataatcatccaaaaatatgggtcatagaaaaatggcatatagtacataacgattttctttctttataaaattaatcagttaacttcaaaaacttattgataatattaattacaaaaggattatcatgtagaacactatgttcagctgcattcccgcgaacttcgatttcttggaaggtgtgggcaacaggagcaagaatatagcgaattgacttagcagaaacaacagaaataaacctatctgtattagtttcatctaagatatttccataaatatttaaaacagaaatattgggattaaagcgacgctgattaaatagcatacctaaataggaaatactcatcagaataggacgtcctttttcattgagacgattaacattaggtaaatcgcctaaatacattactccatcaaagggcccagcaattaaagcgcaatggtctaagtgaggaaagttttttctcaagcttgttttcatttcaacctttactactgaaggtgcacctagagaatgggcgaccgcactatatttcttgaaatggtatctcttacttaagtaagacaaggccgtgcgtaagtaataggaacttgcataaacaccagcaattcggtctttaaaaactaattgaacgatgggctgtggatcagctgtccaagttccttccaaaataaaattaccaaagggatcgattgtaactttaagaaatttatctgttccttttgccttgcaagcagcatgaaccattttgttagttgtataatcgcctccgcgaaaaccgtgtacgtaaaaaattggtgtttgcgtaattgtagaagctttttctgttgttgaactatcttcaactttacgtttgtgcattctgagtagccagcgtgtaggagtaaaggtagccattaaacctaaaaaagtcattcttgcaatgctaggttctttatttttatgtttattattcttttcaacttcttcgctatatcgtttttgaataaaaaacacactacatcctcccttcgtattaattttagcgttaaaattattctaacattttatcagctagagcagataagaaaggaacatttatgaaatactatgcagtaaaaaaaggtcgtacacctggtgtttaccggacatgggaagatgctaaaaaacaagttgatggcttctccggtgccgaatataagtcttttgaaaagataactgatgcgactgagtatttagactggaataaggaaacgcaaccagatattgttaaagaagattccttaagcaatgcgattaagaaaatccaagctgctaagatcgtgccccaggctaaaaagaaaaaaataaaaaagactagttctaataatccagctgactattttgcaactatttatacagatggtggatcacgaaatactggtgtgcataaagggggacatgttaataaaactgataaagcagcgtgggcttatttaattgaatggcaaggtggtcgcacttatggttcgggcggagaatttggcgccacaaacaataagatggaattattggggctaattaatgctttagagaaattacttgagttgaagtttaatgataaacatcttttatttgttttagattcacaatatgttttaaatggaattaataagcactggattgagggatggaagaaacgtggctggaaacgagcaaatggtcctttaatcaatgcttccgaatggaaaaaactagatagtttactaggtcatttttcggatagtacttttagctggaccaagggacatgctgataacgagggcaatgtttttgtggaccatgaactaaatcgttatatggataaaatgaagtagtaatctgcttgataaacaaaaaagtctgcaaattgcagacttttttaatgcactttttttagtagttgctataataataattgaaagactagaacgcacgcaggtactagttttgacgacggagacggctattttaagccgtctttttcttttaattttttagtttaagacaatgacaccgccaaagatacgtctaaaccagctaacgattgaatcaattaatttttggaaccagttacgagtttcaggtgtattaaattttgaaaagatattcttagcaccagattgaatttggtctgccagttggccagcttgttgctggaagtttttgtcttttaaagcaccagaatttttaatcttaattaagacattaataatttgttctttttgattattagtaatggtgtcgcctaggtggttaatgttaatttgattgttaacgatatctctaatttggctatcggaaatattttgtccctgtttagccatttctttttttgcaccagctacggcattgtttaattgagcgtcagaatagccatcttttcccttattttggctagtaatcttacttaaggtattcatttcagtttgtgctgcattaatttgattttgatttaaagaattgccatttttagcataggcagcataaacaccagctagagcacctgacccatcaattggcgtagcagaagtgacgtaaatgtccgcgtcagaaataccagcagttaaagcggcatttttgtactggttagcagtaatagttgtaatgttattgtgaccattataaggtaaaatgtgaacattaatcccgctaccagagctggttttttggatcatagcgctagaccaaacacctgaattattagtgaagtcatagccagaaggattaagatattttacaagatctgcgccagtaatagtgatggtggtataattactaccatttaaggactgcgttaaagtatcaattgtcccctgtttttgagaagaggtaagggatgtacctaaagttacgacaggagtgtcattttcatttgccttaactgttttagtattactaatagcagttaatcctaagattccgcttgttaagatagcgacaagcgcggttagtatttttttcataataaaattttctccttatgaataaaatatactcaatgtgatggctatattataacctaaatagctaactgaattatgtaaataagtattaagatgctataatcataagcaaaaggaggcagacgctgtgttacgccagccaatgttaacggtaattatgcctgtctacaatatggaaaaatatttaggccgggcactagaagctttagcaaaacaaaaagataaaaattttaaattattgattgttaatgacggatcaaaagataaaactcgcgaagtagcggaagggtatcgtgatcggtttctttattttgacattattaataaaaagaatggaggcctttctgatgctagaaacgttggaatggctcatgtaactactccatattttacttttcatgatggggatgactgggttgatcctggctatactgcatattttgtaagagcatttgatgagcatccagatgtagatattgtttcttgtggtttttggattgattcagaaaaaagacatgagagtcatccagtaggaaataagcaaagcggtggtttaatcgacaagagagaagcttatttgaagatgacgaatgtctttggctcgcctgtaaaggggtatacctggaataaaggatataaaattagcgtcgttaaaaaatatcatttgcgttttgtggaagatttagcctttatggaagatcaaatcttcaacgttaaatacgtatcgttgactaatggtttttactatagttcaaccccgtattatcattattggcaacgtgctgatagtatggtgcatgatcttaatcctaaaaaaataccagataatttccgagctaattatcgtgtatggcaccaaattattaaaagcttgatggcggagcgtgaagcccaaaaagaaaataaaaaggttgcaaaaaaagcatctttaagtgatttagatcatcaagatttataagaatttacagctaaaggaattggtatgaaagtaaaagttaatggggttgaaatttactatcagaaattaggtaaaggacatcccttaattttgttacatggacatcaccaagatggtggaatcttcgataaattagttgcgccgctttctctctattacacagttgtggtccccgatatgcgaggccatggtttaagtgaaggagaagcaagcgagcattatcaaactgaagttgaagatttacgggcttttattagcgcgcttaaacttgaaaagccttatatcttaggctttggttcgggaggcttagttgctctttctttggccgctcaagcaccagaattagtttctaaaataattgttgctggtacttacgttaatggaaacggcgtgaatgcaaagcacattgcggctaataccattcgaggcttttttaagggagatcgtgacagcaaagtagctttaagagagagtcatattcctgttgaaacgttaaagcgaattaagacgccgaccttatgtgtagtaggtgaaaaggattgggttaaagttgaacatgttcgttggtacagtcaattgcttcctaattgtcgtttagttttaatgcctcgtcagacgcattatagttatgttgttcatagtttaaaattattagatttaattaaagatttttgtaaagagagctaaaaaagtagcgctctttttctttttgatctaaaaattcgatagaattaatatgtaaatggaaattaatagatagcagaaggttagaacaatgacaaaaatagtggttcaaggaatgaatggcgagatgtctgtagatgatgacaaaattaagattaagcatactgcgcctttatttccaggtaaacgagaagtaacattagacattcacagtttacaagctgttgtatataaaaaagcgcacatcttaattaatggttttttaaaattagttcctaagggagataatcccatgctttatcaaacggctagtttacaccaaatgggaaaagatgaattggcaattgttttgagagcttttgaaaataccaatcctaaagatgcagagcatttttataattatgtcgttggtcgcttaaatcagattaaagcagcagaaaataatcagttataatctatagctagaaaagtagagcaaaacgggaatttttagttataataaaactagctgttaattttacaaggaagggcaaattgatgaataaagaagaattgcacgaaatgttgcacccaatgaaattaatcggtcttggtagaaatcaagctttagcagagagaattgcgtcagctttggacaagccattgttagagactgctgttcaacactttagtgatggagaaattcaagttaacattacagaaagtgtcagaggctgtgatgtctacgtaattcaatctattcaagatccagtaaacgaaaactttatggaattgatgattgtattggatgctttacaccgtgcatctgctcactctgttaacgtagtaattccttatatggcatattcacgtcaagatactaagaatcgttcacgtgaaccaatcactgctaaattattagctaacttgcttcaattgactgatattgatgacttgattgctgttgacttacatgcctcacaaattcaaggcttctacaatattccagttgaccacttgcacgctatgccaatcttagctcaatacttcttagataacggtattgcaagcaaggatgatgatgatgtagtagttgtttctccagaccactctggtgcaaaacttgcacgtacttttggttcatattttgatgcaccaattgcaattgttgaccaacgtggagcacgctatgatgcagaagctcatgatatgatcggagacgtcaaggataagactgttattatcgttgacgacttaattgatactggttctagaattgcttcttcaactaagtcagttttagctgctggagctaagaaagtttatgttgccgcaactcatgctttgctttctcaaaatgcaattgatgtcttaaacgaattaccagttgaacaaattgttgtaactgataccatcaagcacaagaagtatccagatagaatggttcgtttatctgttgcacgtttacttgccaagggtattgattacatttacaacgataaatcaatccaccaaatctttgatgaacaaaacagaattcaaggatagtttacattaaattttaatattttataaaaaggctgaagcttagtattgtactagttttcggccctttttttatctaaaataaatactatacattattgaatatccatcaatattaagataatattaaatgaaaattagctaaaagatcaaggtggataaaatgaaaagagtgtttcaggcgcagctatatctaaatattttgatggctgtaattattttgattaattatcgtacagttaaagattggatttatcttggaattttagctgtagcagttgtagtaagtaaaaataaaaggatttcgcagctaataaatacagtacttatacccatggtttttatcgatcaagttagaaacttgagtgatattctcattcagcacttttctcagttaacactactcatcttttggatttatgctgttggggccataatagtattgattccggtcacaatagtcgaatatgggaaaattaaaaagccaatttggcgattgatagcatcggtctggatgattaattttgttattatgttttgctatcttttaaccttaaaaaatgtaaatccagacggctttttaatgagtttaaataaatctggcttggtttatgctttagcaattttagtttatgtatattttgctgttaaaagttggggttatgaattttgttttaatttaccaacttttaaaggtaaaaaaatgcagctactttcatttattctaatttttgggatagcgatttggatttcattttttaaagtatttagtgaatttgctcagagatggcaggaattattttggaattgggatttttctttacttaatccaactgagtcggcccttctaaaaaatgcttggtctgtctttctctactcaatagaagcgggaattggcgaagaggcgactcgatatataaacttagttttactattagtaattttcaaaaacaaaaagtggcaaattaatggtgcggttttaggcagtgcaattctatttgctttgcctcatattggaaatgcctttgcctcagaacttaaacaaacaccactagcaactgcttttcaagtgattgatacatttggctttgggtgttttgcggctgcgctaattttatatagtggtaaattatggccgacaatggtaatccatgcactatatgatattcttgcattttctaaaaccccattgactcaagatagcgtgggaatttttggtggaaatacaggtcagtttattcatgtaattattagtttagtactttgggtaagttttgctgcttttcttttaatcaagaacagaaaattagtaaaacagaatgttcaaatcttgactcgggttcaaaaaacagatttgacaatttcatgaagcaagttataatacaagcaaataaaatagccaattgatttactatacaagaactttaattttacaaaaatagaaatgcctctagtataagttaagtactagaggtatttttgtctttagggggagtacaaaatggatgaaaaggagaagctaaaactaaaaagatcgcttaagagccgtcatgtaacgatgattgcaattggtggagctattggtactggattgtttttaggatctggtacagctattcaaagtgctggtccatcaataatcttgtcatacctaattgttggaattattagctttttcatgatgagagcgttaggggagctaatcttagctgagcctgatcaacattcatttatcgaatcagtaaaaaagtacctgggaaatagaatggaatttgttgcaggttggacttattggttatgctggcttagtttagcaatggctgatttaactgcaacaggaatttatttaaagtattggtttaaagacttaccacaatgggtagggcctttagtaatcgttgttctgttaatgcttgttaacatggttaacgttggattatttggtgagcttgaaagctggttttcaatgattaaggtgctggccatcttagctttaatcgttactggcttaatcctcttagttatgcatagcaaaattgactctagaactgtttcactgagtaacttgataaattatgggggcttttttccaacaggctcatggggcttcttaaagtcatttcagatggtagtctttgcctttgttgggatagaaattgtcggtttaacagcaggtgaaacggctaatcccgataaagatattcccaaggcaatcaatactttaccagtaagaattgggttattctatgttggttctatgattgcaattatggcagtctatccttggaacaagattgttactacaactagtccatttgtgcaggtttttggcgcaattgggattcctgcagcagctggaattttaaactttgttgttttaacagcagctatgtctgctactaatagtgctatcttttcaactagtagatcactatatgcactttcacgtggaaataatgccccaaaaagatttggaaagttaagtagaaaagcggttcctaataatgctttgaccttttcatcgctaattttatttatcgtcgtaattctaaattatattatgccagcacaagtttttgatattatttctagtgtatcaacgatcaactttattatggtctggataattattatgtggacgcatttgaaatatcgtgcagaaaataaaggaaagctaggtagttttagaatgcctggatttccaataactagctgggttacaatcattttctacttagtgattttaataattttggcgctaattccagccacaaggctgccgttacttatttcaattatttttattctagctttagcattgagttacacccttttagaaagaaaaaattaaatatcaaataaagactggtaaataaaattgtcggtcttttatatagcattaaattcgaaaaaagcaaaatcctatctcgttattagtaatagggcttggtataatgattgtaattaatgctctgaaaacgctatactgtataggaatagaataataataacgaggcaaaggatatggcaagacaaaaaaatttagcaagacgacatgaaatactacgcaatacttttatgctcttgaaaaaaagaggcatggaaaatgtatcgctacaaatgattgcagataaatctggcatttctaaatcattactccagtcatattacccacgtaagaatctactgattactgaaattgttaccaattttatgacggcggtcttaaagagtttaaatgcgactgatttcaaaaatttgaatacatattctaagatgaaaatctttatctatttgattttagaacaaggtattcaagatgaaggcgttgaacgtgtcgttaaaagtattttaagtgatggcgattcactagatcgctggagtcagatacttgatgattggcttaagaatgaaggcgttaagcatgatttggaaaatgatcgtcaggttcagattggtttaaactttattgttacagctggaggaggtctatacgtaaaacggactgaatttgatttagatgccgatcaaatttctgatataatggtaaaaacttttatgtcaacatttttatcaatagatgagtcaaagataagccaaacacttgtagaggctaaatcagccttacaaaaatatgaattaactaccttaacgcaggctattaataaaatgttcgacaattaattttaaggaaggtcgaggaaatggcagtacgcacacgcagtgagctgcgtagaattgatcaggctcaaactgtgcatgataaaagatcttttggaattgcaatctttacaattgtagttttatttttcagtttagtaaccttcatgaatccgatttttatgaagagtcaaattgctaaggaaagcaatggagttgtagctgaacgctatattaatcagaaatttgataatttcgctgcggcaattggcgctgatcgaagtagtaataacagtactaataatctcctaactgttaagcagacaagaccgattgcgaatgcaatgattgactatactttgggagttcatttatttagagcagaaaattctagtttagctagtcaaattcgtaaggttattttgactaaaatcgatgacaattcttcaatggaagctaagtctgttcaggaaaagttgaagaagaataaggaaagtgggctttacgcaatcattacaagctttggtttagctaatgccactttagcagcaaatgttgagctcgtatttttgattttaaatatcttggtaatcatttttgtgggtatcttagcttatcaacaaattaaaaggctcaaagaaattgtttcaactgggcgtttaattcatatgtttgcggctggagggatgagagcatcactaggactgattgtggtttttggcttactagctttcattccaacaatttttaatgttgaaggtttgatcttgaatattggctattttttggagatagcgagtggcattttcttagagttagtaattgtcggagtagtcttgtttgtaattagcactgttacttggcagcttacaagtgcaaaatagtaaaaagttaatgaataacaaaaaaggtctcaggtttttacctgaggcctttttctgggaaatggcgccggattggatgatcttaattgtattcaagtaagtgtaaagtagttagggtataaaataattgtaatatgcaacagccataacggctcttgtaagggtcctcaaccatttctcactacttatttttacagtaattagtgcttaaatcaagttgaaaagcctaattattcttaaataatataatatgtttgaattgagctgaaagaatattctaaaatcacaaattcgttactttatagtctttcataaggtattaatttattaattattctgcctgatccattgctttttaccaagataataccaagttatatggtcggtagtaattgactgaccataagcgtaactttttccagaagtaacatgattggcggtgcgtttttgtagatttggataaggactagtataaatattggtatcgaatgaatgattatcgatatttaccacacccgcagtaaaatctggattgttgtaaacatagaaattatggaaccattggtcattacctaagttatagtaagaataaccatcttgataagaacgaccgaaaattactgtattcattcggcgctttttatttaaagaatcacgtagtttttctgcttgaagtaaaagggctgatttaatagttgcagatgaatcaggatcagctacttgttttaaaatcttgcgcgttgtcttgtcactgctatctttaatattttgcgaggaagatattttttcagagtttttttctctgctcttagtttcagtgttatcatttgaggtttttagcttaggttgattagcagcaacctgattaaataatttaaaactatattggtagacattattaatattcacgttatattcatgccctgaaactaacttaatatctcctgggaagtaagtaataattgttttgaagtaaccatatgccttattgctaaagttattaacatttgtagcttgactaacttcgcctgtatctaaatcagtgacagtaattttaggaatgccaggggtagttttatcagataaataaagagaccaagcaatgttatttccttgaagcaattctattggaaaaacgccactattgggataagcaacagcacttttagcagcagccttatagccatcgcttgaatatgcaacttgctggactgaatagcggtagctattttcaccgtatgctgcaccaataccagtggtagtaagtctacttgataaaagccacgcacgatgtccagtatccgatccatcaagattataggtatcagttaataaatctgtgattacatcaccagcagattgattgcttacattaaaattcaaattagagctagcagaaacatttttggcaattgtccagtaagtatcgctaatgtagttcggtcgtgtttcactaggtaacccgtgttgattagtaaatgggttagccttaattgcagccataacacttgcggtaatttgcgcgttgtcattatctgtcttatttgtagaaatacttggcagatcaaacaacctacgataaaaattaatatagtctaattgagagctaatataagaactggtaacagaaccaggtgaaaatggtgctgttaggtgagggctgcttgcataaagattactggagttaaaagtttgttttggtaatcttgaatattgattttgaatttgatgaacttcttgaatttcatctttggtaaatgttgcggccaacgcttcgttaatcgtaacggtgctagttgtggcactgagcgtaatagcaactataaaagcggtggctttttttgtaaaattcatcttatctccttttcgggatttattagagtaatagtaatatatataacttaattataaaaaattttcattcttttgagactttttttcaaaaataatgcattatagcgtcacgattgtttataataaggtttcgaggacaaaaaggagataaaaatatgactgacaaaattaaggtaggtttgatcttcggtggaaattcttcagaatatgaagtttctatcatgtctgcccacaacatttatgaagaaattgatactaataaatttgatgtttatccaatgtggattacgaatgatggttatttagctaatgacgccgattctcgcaaagttttagataatcctaaaatggaagtagctaatcctcataaagtagcaaatatttctaatattgttgaattaaaagatcgtcctgaaattgacgtatttttcccaattgtacacggaaacttaggtgaagatggatgcttacaaggtttatttagagttttagataagccatttgttggggatgatgttttagctgcagctgtaacgatggacaaggaaatgaccaagattttagctcaacgtgctggtgttcctgtcgcaaaatggattgcagttaagcgttttgaatataacgatccagataataataaattggactatgaatacgtagccagtcaattaggctcagatttattcgtgaagccatcaaatcaaggctcttcagttggtgtaagtcacgttactaacgaaaaggaatacaaagttgccctagctgaagcattcaaatatgatgacaaggttttagtcgaagaaactgttcacggtactgaagtagagactgccgttttaggtaatgataagccaatcgttgctggtgttggtcaaattattaatgccaaggattcattctatacttatgaaaataagtacgatgataattcaacttcaactttggaaattccagctaaattacctgagggaattgttgaaaaggttagaaagaatgctttgaaggtatttcaagcaactgaatgtagtggcttagcacgtattgactcaatgcttcgtacggaagacaaggaagttgttttaacagaagtaaatgctcttccaggattcactaatattagtatgtatcctaaactatttgaagaagttgggattccatatactgacttgattactaaattaattgattacgcaatggaacgctacgatcacaagaagactttgttacataaacatgattaaacttagtttaagtaaagggagaatttaggatggcaagcgaccataattttgaagaactcgaggccccagcaaaaacggcggaggaacttcatattagcgtagcaacattaagaaagtattctttaattgttgaaaaagttactggaaataaagactactatgaaaggactaagcagaagtctcggctatattcagctaaagacattgaagacttaaaagctttcaaggctctgtctaaaaaagctgatctgactttacaggaagcagcaagacaaatttttgcagtgagtgataaaaaagctgaagaggctaaaaaggctgcaaaagtgcaaaaagaagttgcaactaagactgctactgtagatgctgatcaagtagttaaacttttaactatgctacaaaatacgattgcaagtcaaaatcaagcaattcaggatttgcaaaagcaagtagcgcgcgttgaagctcaaaataaaaagttaattgatcgatcacaccaattagctgagccagaatcaacagattcacaaaaggaagttcaatccaataaagatcaggaagctgccaataatattactgaagaacagaaaagtgaccaagaagttcatgaagaaatcttaagaaaagctagagagaacgaagaaaagcgtcgtaaacaaaaagtagaagaaaatattcatcgtactttagctcagatgcaaattcgtcccaagaaaaaacaccattggtgggatcgcttttttaattaaaaaataggatgcctgtttgtaggcatcctatttttattcgtcttcaggttcaataattaatgactctgctaacaaaacgtcgttatatagatttaaaatataggttcgatatttgctttccttttgcccaatcatttctagatattcgcgttcaatcgcaaaagccctaaaaaaagcaagacgctgtagatactgttctgatttgcttaggttaggctggtcaattgtttttagtagaacgcgcatatactcacgtgttttaacaactcgtttttgattaagtagggtatagataacatggcgttttactctttgcggtaaatacattttatgaacgacaactaaggcgcgtttaaccatttcacttcgtattttatccattacaatatgagcttcttcgtcactgacattatgcggaagaataaattgaaagacaattattggaacaagcatacttaaaataattaaaacagcctcagacatgatgactaggttataactttgacttcctaggaagtcaacgcttatcgttaatgctaatgctaaagtaactgcaccatgaatccctccaagtgaaaagactatgctttctcttcgatcataacgaataattaagcgaccatataggtaacgaactagcaagttggcaaggtagactataatgccaacaataatccatttagctaaatctccattaaagagcttattacgtgaaattcttaccatcattaatcctaaaataatgaagaccatactataaagatatcagaaataagattttgtaagtctcggctcatatgaacctgtcttgaattaagtaataaactttgctgagattctgcattatgtaagagaccagccactaccacagcgataattccggaaacctgtagatgttctgctaaagcatacaaggctaatggggtaagaatataaataagattttgagcatttaaggaattaaatctggatctgacaagagtctgacgaaaaataattattacccacgctacagcaaagcctaagactgcaccgccaatcgaagaaatacaaaagtcctgaatagtctgtccataattaatatatccgtttgcaaaccaaagcaggctcatgttaagcaagataatcccagacgcatcgttaaaaagtgattcggcccttaaggctgacattacacgacgaggcatccgtaatccattcgttaccgcttcacttgctgtagcatctgttggcgtactaatactgccgataataaatgcaagcggtaagctaacgtcagtaagcagatggatgctaaagccactaacaattaaagccagtaaaaccatgataatagttagtccaattatctctttaatacgtcggccaacgttatgaatcctagtcttttgaccttcaaaaaataaaagtggcgcaacgatcaattccataaaaatttctgaatcaaaactggcaacttgttggtttaaaaaggggacaagaccaataatgattccgatgatcatacttatatagttaactgatactttatcaattgcttgggcaataataatactaatagcagctgcaattgctagagtaaaagttgaaatcataagttccatagtttagatttacctcagataaattactattttttaataattagtaaaaacttttaatgctactatattagcatactcaccatttaggttattagggaaggtgaagatgtgaaaaagaatcaaaaagtttggcttagtttaacgactttaattgttggcatagtttttacggcaattacgtatttttctacaacttttgctagcaagccaattgctgtaattaccgataatcacattcaagacacgctaattaataaaaccaaagacaattatgaaaataaagatgaagttaggcaacaaatattgcatttaaaaatcatctcaggaaaataccgaggtaagagattcgttgttaccaatacctactctccttcacaggctgtttcacaaaaatatcgtcctcatcaacgtgtgattgtatcttttattaaagaaaagccaaaattagttgaacctaaacgtgattgggtagttgtcttgagcatgtttttgactattagtctgatcattttaatcacaggaaaacaagccagtttattattaatttcaatggttttgaatagcattattttttattttgtaattaaaaatgatattaaagaaaatggaactaaaattttcttagtttatggtattgcggccattttgtttacccttatttccctgataattgtacaaggctttaatcagaaaatgattgttacattatgcgctacgcttttaggagtttttgtgtcgtttggaattttttatttagttatgaggttgacacatgaacacgggattgactatgaagcagttgattatgcaacgcaagatccgcgtgcgctatttttatctcagaccattttaggagttcttggagctgtaatggatgaagcgactgatatcgtttcaagtctttatgcattagctaagcataaggttgacttaacttttaaggagttatttcttagtggccggaccttaggacaagaaattatggggccattaataaatgtattagtactgatttttatggccgaagcgctcccgatgacaattttgtatctaagagataataatactttagtttatacttttaaatatactctttctttaggtgtaattcagagcttaagttcagcgataggcatagttttaactgtgatttttgccactcttgctagttctgtctttttaaaaaaataaaaaagtagagggggcagtaaaatgacaactttaacggccctattgataattctcttaattttaatgattatcgttggtggaaaaactggccttaaaagttaccttagcgtagttattaatgcctgtttgttaattcttgttgctttgttaatttcttggggagtaaatataattttagtaggagtaatttttattcctttaaaattattaacaattatttatttagggacgcatgattacactgtagctaagaacgcatttttgacggccctgtgcgtgagtttgatcgtaatgctgataattatcctgtttgagagcttagctcagactcagggctttggagaccaggcaggagaagaattaattggtttatcgttgaatgtaggaatcagtttcgctcaaatagctattttagttgcgattttttcaatgctaggagccattgcagaagcaagtgtagcgatgagtgcaggattacttgaattaaaaaggcatgatccaaatattacacagaaacaattgatcaagagcggaaatgaagttggttctgatgtattaggaacagccatgaatacgattttatttggtttatttggtagctttttgccaatatttatttggtatatgaggttaaattattcattgtttgagattttaaatgataaactttttgtagatgaatttttaattattgtgtattcatttatcggtgtacttttaacagttccattgacgacgatatttttagcacatacgttaacgcatgacgaaattaagaaataaattgcatagaggcttagcaagatgaaagtagagtatttaacacaaaagaattttaataatcgcgagtttaaaatcacgtattatggattacaagataatccgcagcttttgcaaaaaaagagaccgttgatactcgtttttcctggaggaagttttgaccatttatctttaagagagggagaaccagtagcattggcatatgcagctcgtggctttaatgccgcagttgtttcatataatctaactactgatccaggtaaaatatatcctgatgcggccttatcaggattaaaggctatttcttattttagaaaaaatattgaaaagttaggaattgatcaagatcgaattactacgatcggattttctgcaggtggtcatgttgttagttcaatgaatgtgatggcagaaagtgaaaaatggcaggcaaaatataattttaaccatgatcaagtagcacctaatgccacaatcttgggctatcctttaattaatattaaagacattggctttccattaccacctgatgctaatcaaaaaatgcctactgttaaagaattattagatactgctttaggagtaacgcctgatacgccaccgacttttattttccaagctgtcgatgatccagttgtcttgattgataatacaatcgaatatattacagctttaagaaagaaaagagttcattttgaagcacatttgtttaataaaggcggccacggtttttcacttgctactcctgaagtggctatggctggacgggagcctgattcacatcttgcacattggtttgaactaagtcttgaatggttaaaagacagaaaaatttatatttagtttcacgtgaaacaagacttagttttatataaaaaagtccgaaaaggaaatgaagttaatcatttcgcttttcggactttttgtttagtattagatgttttttattctttagccataaagaataaaatttctttaccagaagctagattatcagaagtagctaagattctaagcttgattgcttttgctactacatctcttaacccaattactttgtttttagcatcatttggccaattaatttctttactgaagtcgctgaagttttcaccatcttttgaaatggcaacttgaactcgtaaaatgtgacctatgcggtcgcgtgaacgaggcacataaaccattcggctcagtttataaatatgattgaaattgaaagttaagtctagcggactatctttactaattttgtcttttgaaagccattcactagctagcttaagatcggttaagttttcgactggagaatctttttcactttctgccgcgctagtaacttttacattagaaattgcataatccatttgatcgcgcttagtatgagttccaaagtattcagaccaatccgataccttgttaccaaatttatttctaattctgaaccgataacgtgtattaggttcaagttcgtggaaagtaaaggtatctccatcaatattagtatgaacaattccattaacttcgatatcagccattatatttttaccggcgaagttagttggattagtccaagtaatagtgatgctctttgaagttaaacgatctgttaaaattgcggcacttcttggagaagccatagcagaatcgatgatagcatgttgttcaacttcactaccataactaaagttttcaatcgtaagctcaaatttattatcatgaatgtcaactgctggcatttttaccttaatagcaggttgcagttgacctgtgaattggccgaattctttacatggtacgtaatcttgctggtagaaaataccttcttctgatttgttaaagctatctaaatcattatattcaggtaggggaacaatttgatcatttaatttaagtgaaactttacctggatagcgatcagccataattgttaagaaagtagcctgtttttcttcaagtcccgcatagcttccctcagttggataaaccgtaatatgaagattagatccattaaccgaactagtgatttgagttgtagctgcgttgcctttttcataatcattagtttgattatcatcttcatataagatggcagaactcttattttgtgggtaaacaagagcacttctaagtgattcttgtaagattgctcctccgcggacataaaccggaagatgccacaatggatagtgcaacttatcgtagattctgccaccaattaattttttaccagtaaagagatcaatccacatagttcggtgatcaggtaggtaaagattgtcttttaatgaagctccacttggatcttctcgcccgttagtaattggtgctactaataagttatttcctagcataaattcatgctttacctgatttgtgtagttaactttttcgtgcgggaatgacaagaacagaggtctaacaatcggcatcccatcttgagcagctcgagtaagagtgtagagataaggagtaattcttcctctaagctttaggtaagcgcgagtaattcgcgtcatttttgcattaaatgcaaatggcgttttttgaatattgccataattatcaattgagtagagcagaggagtgaagactttccactgtaggtcacggatgtttacttgagcattaccgccgccctcttttccgtcaatagcacttccgacatttggttgaccagaaagagacatacttaagaaactagcaatctccgttgcaatttgttcccactcgccacctacaccttcatttgcagtagtagctaaagtttgaatagcactccaaccattacttgccattgcccaaggacgattagttttgtttttatcaactaaaggctcactagcaattgcaaaatcttgcataatcttgtcattagctaaattaggggcttctgtcttaaattttaagaaattagctggtgcatttgtaggtaaagcgccgtaaaaaccaagttttatattttgctccttggcaaaatcaactaagttagctaattcggtttcatttaaagcttgtttactgttgtagttaggaacaaaccagctaagtgggagatggtatgagcggtagcgttcaatcattgcacgagcagaaaattgatattgttcttcaccattaagagaggacttagcaataatttcattatcagcatgggcaattttataagtattaccatcttcaaattttatggcgttattttcttgaggcttagcaacactccagcaagtatcaagatagttacccaagtatcctagaccaagtgcatatttaggtaagaagaggggagagccagtaattttgtagtactgacgcaaaatttcagctggagaatctcctaaaagatagaaattatcaaaaataggagtttgatgggtaataatagcagtatttccattttcacctttaaagttgtaaattccatctttccaagtgtttcgcaattctgcaaaaccagcattagaccagaaaaagccttctgggcaagcaactgccccgggaccagttaagttagtatttttaatttcaataatttttcctttatggctaaagcttccattttgcattccgccgccataatagaattcatttttgttttgacgtaggaattccctagaacaatctgctcctagttcaattggactgctttgcatcatacggtagcgatggagttgatcatcaaaaatgctaaagattgcaggatttttttgtaagcgaagtgaaaattgaccacttttaatcgtgaaagtttcatcagttactaaaagttgtgattcttcaaaaggacgcaaactaaagttacctgcggcaatcgttaaagacggcgacaaaggtttaaattctgcagttggatcaacgattaatcgaaagatccctttagcaataatgtatagacgtgctctttttctgtctgcaaattgcagatcgtagtagcgagtacctttcgctacctgcactaaacgacttaattgttgtggttgttgattattagtaatttcagacatattacatttcttctttaaattaaatttttcatttacgtatagttcatattataacgaaaaaatgcatttcgtgtttttttagatttgacataaagcgctttctagaatattctgtagaaggtggtactaaccagtttaagattggatggggttagaagatgaaaagaccactttatcagcaagtgatttcagatcttgaaaagaaaattaagactgaaatgaagccaaatgatcgactgcctagtgaaagacaacttttaaaagaatacggtgtgagtcgaaatacaattcgattagcattaaataatttagaagagcgaggcattatttatcgattgcatggaaaaggtacatttgtttccacaatttatctagatcagaccaacttaggaagtatgtactcatttagtgaacagatgtcagaagcaggacgcaagccaacaacacaaaaccgcacattagagcttgttgttcccgatgcagctgtcgcaaatcagcttaatttgaaagctggagaaaaagcgtacaagttagttaggttacgtctagctgatggagtaccactaatgtatggagaaacatatttaccagaaagtatttttccggatctaaaaatgtcggatttaaatgaaaatcatttgtacaccgttatgaagcgaaaatacaatgaacaaagtgttcttgcctttgaagatgtacaagcggttaatttagataaaagagacagtaagattttaggcgtaaagcccggggatgcgagtttaaaaatttttagacgggcaatcaatgataaaaacgtgccaattgaatttaccatttctctagctagaggagatagattcatttaccgatcacggcaatataatcatttagtttagttattgaaaggaataagccaatgtttacaaaaagtgacgcagaactaaaaaagatgggcgcagatattactactagagaaattcagcaacagccttctctatggaaagaaacttttaagatttatcaagaaaagaaacaagagattgatgactttttagctaaaattaatcaaaaatttaacaaggtaaaagttatttttacaggtgcaggaacaagtgcttatgttggtaacactgtgatgccatatttaagaaagcatggcgatcgcactaagtatgactttgaagcaattgatactactaagattgtttcaacaccagaggattatcttgaagcagaaacgccaacaattctagtttcttttgcccgtagtggtaattctcctgaatcagttgcaactgttgaacttgctaagcaattagttacgaatttatatcaaattgctattacatgtgctccagaaggacacttagctcaagacttaaaggatgatccaaatggacttgttcttttaatgcctgctaagtcattagaccaaggttttgcgatgacaggttcattttcatgtatgagcttagccactttattggtatttgatactagaggtgatgcagaaaaagaagcaattgttaatgaaatttctaagatgggcgaaagcgtagttgatcgtgaagctgaaattcaaaagttagttgatactgattttgacagaattacttatatcggtagcggtgctttaggtggcttagctgaagaagctcgacttaaaattttggaattaacagctggaaaagttgcagccctatttgatacttcaatgggattaagacatggacctaagtcattcttagataaaaagactattgtttttgactttgtttcaaataattcttacaccagaaggtatgatttagacattttagatgagattaaggctgatgaaatagttccattagtaatgggagtaggtcaacttaagaagggacaagactttgacggtaaattctttgccttttctggagaagagttaccagatgcatatttagcattgccagatattatgtttggtcaaacaattgccttgcttacctcggttaaggttggaaataccccagatactccttcaccaactggtacagttaaccgtgttgttaagggtgtaacaattcacaaattcatcaaataaaattcaaattttgaaaacagtttcaatttagaatagaagttaatttaaggagttaaatactatgtcatattacattcatgcaggaaagttctttttagaaaatcgaactgaaaatggtggttatcttgaagttcaagatgatggaaactttggtttatattatcgagaagatgaaaagcctagtcatggcctaattaaggaatatggcgatcaatggattgcacctggttatgttgacacgcatattcatggtttgcttgatgaagatacaatgaagagcgactgggaaggcgttaataagatttctgaaggtttgttgcaagctggtgtaactagttggttgccaactactattactgcaagtgataaagaattaactgaaacttgtgaaaagtttgctgcacataagggtgaagaaactggtgcaaaaatccaagggttacactttgaaggtccattctttactccaaagcatggtggagcagaaaatcctaagtatatgactgatccttcgattatgcttttaaagaagtggcgtaaggcttcagatgacatgttgattaagatttcaatggcacctgaaagaaagaatgcccgccaatttgtacgcgaagctgtaaagatgggcttagtagttgccttaggacactcagattctgattttgaagatgccattgcttgtgttgaagccggcgctagcgtctttacacatactttcaacgggatgaatggcttgtcacaacactcacctaatattattggtgctgcattttcttctcgtttaacaacggatgaattaatttgtgacggtcaccacgttgaagaaccagctgttcgcgctttagtaaatgcacgtggaccagagcatattgccttaattactgattgtatgcaggctggattaatgcctgatggtgattatgttttaggtgaattgccagtttatgttaaggatggtatggcacgtttgaaagatactaacaacttagccggcagtattttactcttaaaggatgcagttaagaatatagtggactggaatgttgcaacgccagaagatgcagttatgatggctagttatgtaccagctaagagttgtaacttactcgataagtgtggtgtgattaaacctgatcacccagctgactttgttgttttgaatcatgatatgactgtcagtgaaacttatctaaatggtgagtcacgttacaaggcttaaaagagtatacttttagtaggaactttagaaattcttaaaaaagtggtcacaaccagttgactagtaaaagttaatatactaagattaaaactgtagaaagcgtttacagaaatattttacagaatatggaggaatctatatgaatattgtgggagctagaattgatggacgactagtccatggtcaagtagccaatctttggaccccgaaacttcaagctgatcgtattattgttgtcgatgaagaggcagcaaaaagcgatatccaaaaaagtggtttgagaatggctacacctcttacgactcgtcttagcgttttgccagcacaagttgcagcagatcatttgattcatgaacgttatggtaatcagcgaatatttattgtcgctaaaaagccagcagccttcttagatttacttaacttaggtcttaagcttgatactttaaatgtaggtacaatgtctcaaacagatactactaagcaagtaactaagcagattaatgttgaagaaaaagatgtcgaagattttaaaaagatagcagataagggcgtgaaaatcacagctcagttaaccccaagtgatgattctcatgactttatgaaattaatgaatgaaaagattaaataggaggtctaactatggcttggtggcaaatattactacttaccctctatgctggttatgaaattcttgatgaattgcaaatttattcatcattgaatacaccagttggtgccggtttaattgccggtttaattatgggtgacttaaagactggtttaattattggtggtgccatgcagcttacagttttaggtgttggtactttcggtggtgcttctaagattgatgcaactaccggtacggttttagcaacagcattctctgtaagtattaaaggaatgagcccacaagtagctatttcttcaattgcggttccagtagctgcaattatggttcaattggatgttttagcaagatttgctaacacttactttgcacacagaattgaccacttaattgaagaaaacaactacaagggtattgaaagaaactgcctctatggtgcaattccttgggctttatctcgtgcaatccctgtatttattgctttagcatttggacgtggcttagttcaaactattgctaactcattaaacggaaacttgaagtggttaggtactggtttaacagtagctggtgcggttcttcctgcagttggttttgctattttgcttcgctacttaccagttaagaaacacattgcttacctaattatgggattcacatttactactttattctcagtattattcacaagtattcaaactttaggtacaggccttcaagcagcaaacaagtcatttactgcaactttcaacggcttgccaatgcttgcaatggctttaattggattagcatttgcaatcttacactacaaggatgaaattagtggtaaaggtggcagcggtaaaggtggaaccaaagaagccgcagctactacagaatcaactaatgtagcttcagagggggaaatcaccgatgatgaactctaaaccaaaatataaattaactgacaaagactttaatcaaattaacagacgttctttatttggtttccaactaggttggaactatgaaagaatgcaaaacactggatacttattcttgatcttgccacaacttcgtaagatttatggtgataatactccagaattacaagaaatgatgaagacacacgtacagttctttaacacttctaacttctttaacacaattatcactggtattgacttagctattgaggaaaatgaaggtgttgaaggtaaagatactgttactggtttgaaggttggtttaatgggaccatttgccgcaattggtgactcaatctttgctgctttgattccaaccatcttcggtgccttggctgcttctatggcttcacagggaaacccagtaggtgtatttatctggattgccgctcaaattgcgatctgtttcttcagatggaagcaactacgctttgcttatgacaaaggtgtaactcttgttactgaaatgagagaccgcttgaatgctttaactgatgctgctacagtacttggtgtattcatggtaggtgctttagttgctacgatggttaacgttaagtttgcttgggtaccacaaatcggtaaagttacaatgaatatccaaaacaacttagacatgatcattcctaagttattacctgccttgatcgttggctttgtttactggttacttggaaagaagaagatgacttcaactaaggctattttaattgttttagttctatcagttgttcttggcggtattggtgttcttgccaaaatttagcagtcaattaaaggaaaaatattatggcaaaagaattagtattgatcagtcacggtaagatggctgaagaagttaaaaagagtgcagaattaattatgggtccccaagagcatattcatgctgtatgcttgcttcctgaagaaggacctgaagattttgaaaagaagtttcaagatactattaatggcattcctgaagaagatttaacagtatttgctgatttaatgggaggaactcctgctaatacagttagtcgtttgattatgggtggtcaaaatattcatttagttgcagggatgaacttagcaatggtgattgattggctcaatagtcaaatgattggcaatgattcagatgctgttaatgctggtaaagctggaattgtggatatcaatcaaatgctagctagcatgaagaagtagactatttaaatagaaattaaaaacgacttacgttggtaaaaccacacgtgggtcgtttttttataataaacaaatttatagatttttgctttgatcaagataggtcaaaacaattgcaagatggcgtgacaaagattattattaattcacaagtttcaactgagggtcagagtgaagatttaaaggccctagctaaattaatgaataataaaccagttaaattaaataagcattttgactatgcgcaaagaagaattaaggaaattaatgaagatccagaaacgagggaaaagatcatgctttacgaaacgagaatgctagaacgtgaacaagctgctggaaaagctggatatgagcaaggaaaagtggattctgctaaaattattctcgaaaatcaattgaataatggcagaactttggaacaagctacggaatttgttagaaatttgaaactgatttctgataaagagttagaaaaagttgttgctatgtataaatagtaaaaaatgcttgcgacatttatatcctgagcattgtacaaataatttataagtattcaatagtgatatttaaaagactgatagatttcatttctatcagctttttttgttgattaatttgttacaatataaacaatttaatgatagcgctataatttatacttttagaaaggtcaagatatgaataaattctgtccccactgtgggaaaccaattaagcctactgatagtttctgctcacattgcggaaagccggttgtatcttccgaatctgaaaaacaattgatgcccaaaagaagtgaaattcacagcaatagattaaaatccaaaaaaagaaatattattattggagtaatcgtcgccgtacttgttttaattatgggcggctggggattatatcaacatggtcgaaattcagcggaaagcacagtaattggtggcaacggaaggctaactaatgctgagattaaaaagatcccgcgtaagcaattagctgcttgggcaattctttatgctgataaaaaatatggtaaaaagtggggcgaagcagccgatgatctaagaagtggtcacttgacaataaaaagttattcaaaatatcgttttggagattatgaaatcagtgctactgacggaagtactttatatgttataaatgatcaggttggctatttggtttctaaagataacaaagagataacttatgttggaaataagtctagctatagtaatagaagtgttttaagtcagatttatccagaaattaaatctgaaaatacggagaaaaatgtaaatacttggaatgataacctgtcaattgttactggtaagtcggatgaaaatgctagtgatcagagttctaaaactagcaaaaaaactaagaagactgtatctgaagataaattatggtcaagtaatcaaaatgatgaactaattagttatatggatgaatttggtgataaaatgcaccaatcgtatgagcattatactggcagtggtagcttgacaactgcggctggacaagaatatccaagttggttgtctcaaggacgttttaagctaagcacaggtgaccacgacagtcgcgatcctgaagatatgagcagtattgacttgaaatggaatccacaggtaactagtgaggatagtgatgatgatacatataacgtggttgccatctttaactataatgggaagagtgcggagcaacatattacgtatctattttgtttctatcatggtgaaccagtagccttagttgatcagacaacgaatggtgattatacaattgttcatgcaactgcaaataaagacttaacttctcactttgaagaaattgcaaataatgattaaaaaaacttggagataaaaatgaaaaatagagtatttattttcttactagtaggatttttggttttaactatggctggatgtcaaagccagattaagcaagaaaaaggcagtaatgaacaagctagaattattaaaaaaactaaagcaaataaaaacataagtatcataggaagttatcgtgatgatgctgatggggcggcaattgcatttaattctgatcatactggaagatatgtatatgctgatcctaaaaattcagatactgacgatcagttaacttggaagaaaactggcaaaaatacttatataattagacttaatgacagtgatgtaagcagtgctttaactgctaagcttactggcagcactttggttatatcaggagatggcgactggaatacggaaacttttaataaaacaaagaataaacttaatttggatgacttcctttcaaatagaaaagtaggaaattcaacttcaagtaaggctaacggtgatgtaaaaaattctaagtctacaaatagtattccaggtgatgaaggattatttgatatgccaaatgaactacgtggtacatggtatttagcaaatgaaagcgacggaagtgtaagtaaactgataattgataaaaataccattactggtgagggatttgtagaaaaattgcataaaatgagtaagaactttgattttaccagctatgttcaggaacatccatcttaccaagatatgacgaaggattgggcaagagtagttgttttatctgaaaatggtgaaagtaagattaacgttcgtggttggctacaaggtgctggagctggagaatattataatttagctacagaacatggacaaaaagttttagtaataggtggcggtgctgaggcttgggtagatggcattggctggaaaaataagacagatgccgaaaaatatgcaaaagaaaaatttagtgatcttcattatcgagaagatattagcctagaaaataacgacgattctgatagcgctacaacaaatgatgaaaattaaccaataaataaaattaggaagagttctttggatagtaatttatgtacaaataaataagctggtagattttttctaccagcttatttttatctaattaatatacagcaccatcgtagaagttgtatcttggacggttgaaatcaaatgttgctaattcactcatcttgattacgttgtcggcaacgccccagctcatcaaattgattgattcaccgtataagtcatcaggaattacaagtaaaacgtatttaccttgagacatagcgtatcctaattccattcctaagccaacgtcctcttccttaggaacataaacgccaagcataacatcgctagtcctaattccaactaagtcaccgctgtaagttgcttgagcccattctttgtcgtgtaaatattcagggtgttcatcaacacgaatgtctttgtattgattttgaagtggaacatagctgttttctaaatcaatagttgggttagcatttaaagcgctcattgcatctttgtaagccttgttttgtgtttcagtaaaccaaccagcaccaaagtaaactgtcttttgttttgtcatggaaaaacctttctttcttatcggtggaatatttttacattaactaactttaacaaaatttgaacaaaaggaacacccacttttgtgtttttgaaatcggttttatataatgaaactagaaatttttgcttaggaaaggcggaacctactacgaatactaaaaaaaatcttttcgatccagaagctgtctttgtaacagatttaactgatcgaaatgagatcttcaagaccgtttctcaaaaattatatgacttaggctatgttaaagaagattttttaggcgatattattgaacgtgaagataaatatccaactggaatttctatgagacctttatcccgaaaattgcctgatgttgccgtacctcatactgagggtaattatgtaagtacgcaattgattgtgccaattgcgcttagaaactctgcaacttttaacaacatggttaaccctactgaaaagttaaaggttaaatttttatttttaattttgaataatgatccagatatgcattcaactattttggctaaaattatggattttcttgctggaacttcagttgatgatttaaatgaattatttaattcagattcaaatgaagaaatttatgatttcttagaaaataattttgaaaattaagatagaaaaaagaagctgcatcgcagcttctttttgtctccagattaaattattaaacttccggataatcagtacttgaaaacgaaagtgagaagtagtcgcagcgtttatatccgattactaattcaacaacttcacctgttgcacttaagatagtcttcttaacttggcgtacaactggatagtctttagcaatatttagtcgttgactgattttatcgtctgcttgtatgattgtatccgtttctgtaaatggctcatcaaatagatataattgcttatctttttgtaaagtctcatatatgctgtggtagttatttggatctttagccaaatttctattgatgaatttggctgggataaatgaacggtgtaacatgaaaggcttatcgccaattaaacgtaaacgttcaatatagtaataactatcatattttggtaaaccaagcctttcaagtatgtctggtttattattttcttgaagttttaatacttcaactctatcttcttgttggttgtcagagaagacctcattatcacttagacgaactaacttgtcctttcttgaacgtgaaataaacgtgccttttccttggtgacgaaccaaatagcccgccttaactaggtctttgacagatctgataacagtaatcgaagaaacattaaatttatcttttaattgagcttcactatagaatttatctccgtatttaaatttaccggagatgatttctttttttaactcattttcaatttgtaaatattttggaatatccataatatgtatcaatccttaagatagattctcctaagatccatgatatcacggcttgagagcttcatggtagaacgaaggtattcattaattccgccgtattgctggtttagaacgtgtatggcgtgatctaagtattctggatagactgactgaatgtccttaatagattgcaagacgcgcttgctagagccatcagcggcagcttgcttaagcatcccatcaacgaagctcttagtagtaacatttgttagagtatagtcatatttgatagtagtaaaaggtgcacctaatgctgataaaactagcaatgcaccaaatccggttctgtcttttcctgcggtacagtggaagagcagggcatttttctcttgatcgttagcaagtaaaagatcaaaaaacttacgataggctttttgagctgtttgtccattaatcatatcttcataagcaaagaacatatgcttaaagccaaattcaggatctttttcagcgttttcttctaaagcaaaaatccctttagaagcgttagttaagtcgtcactaaaaactggatcgaaaatatattttgcaccttcaggtacacgatcaggatgctcggtcttttctttttcggttctaaagtcaacgtcgtattttacaccgtgtttttgcagtaaatctaagtctgatgaagaaagatcagctaaatttccggttctaagcagtttattatatttgatggtttgaccagatacggttttatagcccccaagttcgcggaaattgcgaccattttggatgccaattaattttgtctcataattttcgctcattaatatttttcctcactaaagttatttaaatacagtattattactttaacatattttttcataaatattttagatttattagatctataaaaagaaaacaaatttattaattgttataattaatggtaaaattacaatgtaaagatgcgaattccatttggagatgattacttatggtaaaagattatgacaacattttagttcctgttgatggatctgaaacagcagagcgtgcatttgataaggcagtaaagattgcccttgataataacgctcacttagatgtattaaacgttatcgatactcgtcaattcatgggggaaatgcaagatactttgatttccggagatactatttatcaaatgacccaagattctgaggagtatcttaagagcttaaaagaatgggctaaggaacactttgattttaccgatgtttcttatcacattcgttatggttcacctaagagaatcattgcggttgatttcattaaggaccaccacaatgacttaattattatgggtgcaactggtatgaacgcagttgaaagaatgttaatgggaagcgttactgcttacgttaaccaacatgcattatctgatgttttaattattaagactgatattgataataaaaaagttgccaaacctaagaaaaaacttttctaaaaagcgaacattaaaaagccactctatatatttattaatagggtggctttttgtaaagtggatcgatccaattcaattaattaaaacttactagcgctttcattaaaataatagtacccaagtacgaatatttttggtatgatacataagaacgaacattaaatactaggggaaggaagagcgatgatggtgaatttcgattacaacattataaaacgtaaccaagattcagtggctcgttcttgggctgattctttctgggaatcagtcttcattggtgttggcgctttcgttggttttttagcgacttttaggactcgatgtgattagctgtttttgtcagcttatcatattgagtctttttttgtatttgtcatttaatgtgtttcattaggaggaaacgatgaaaaagttcaaaaaagtcttggttggcctttttgcaattttacttgctgttgttgcaactgcttgttctaacaagtcaaatggttcaaaagatggttatacacctaagtcattaactattcagtttgtacctagtcaagctgctaataagcttgaagctcgtgctaagcctttagaaaagatgctttcaaagaaacttggcattccagttcatgtttcaatgtcaactgactacaatactgttgttgaagcaatgaaatctaaaaaggttgatgttggtttcttgccaccagatggttatgtattagctcacaagcaaggagcagctaatgttttacttcaagcacaacgctacggtgtaaaacaaccaggtggtcaagctactaagaacttagttaactcttacagagccgaaattcttgttaagaagggttctaagattaagtcttggaaagatttaaaaggtaagagtatttcagttcaaaacccaacttcttcagcaggatatgttttcccagttgctgaacttgaagaaaaagggttaaacgttccaaaggattgtaagttagttactgttactggacacgaccaagcagttcttaacgtattaaatggcgatactgacgcagcatttgtttttgaagatgctcgtaacatcgttaaaaaagataaccctaagattatggaccaagttgttccaatttacttcactaagccaattcctaacgatactatttctattagaagcgatatgtctaagtcattccaaaagaaacttgcaaaggcatttattgaagttggtcaatctaaagaaggtaagaagattatcgaatctgtttacagtcacgaaggctacactaagtctaaggacagtaacttcgatattgttcgtaaatatgacaagattattgccaaggacaagaaatagtcaattaaatatagcttagttagtaaaaagataattgtctccaaaagatgattatctttttatgcactgtaaacaatataaatatgttaaggagaaatttagattaaatggcagctactaatcagccaatgattcaacttaaagacgttagcaaaatttatgataacggaacagttggtttaaaagatattaacttaaatattgataagggagaatttgtagtagtggtaggtttatctggtgcaggtaaatcaacattgcttcgctctattaaccgtctacaagatgtttctaaaggagatatcttaattaatggcaaatcaattacgtctgctaaaggaaaagacttgcgcgaaattcgtcgtgatatcggtatgattttccagagctttaacttggttaaacgttcaagcgttttgcgaaatgttttaactggtcgagttgcatattatccaacttggaagacaacttttaacttatttactaaagaagataaacaaaaagcatatgaagcattgcaacgagttgatttagcagataaagtttatactcgtgcagaccaactttctggtggacaacaacagcgtgttgctattgctcgtgtacttactcaaaatcctaaaattattttagctgatgaaccaacagcttctcttgatcctcaaacttcacgtcgagttatgcatgacttgaagatgcttaatgaagaatatggtatgacagttgttgctaatcttcacagtgttgaacttgctaaagaatttggagatcgagtaatcggtgtccgtgccggtcaaatcgtttatgatggcaagatgagtgaaacttctcaagccgtgtttgacgatatctacaatggcggaaacggcaagaaaggggaagaagatgcctaaatctaaggaacagcatttagctgaattacctaaaaagaaatttaagattatgaaccttgtgtgggtcgtaattatggttttaggtctctttctttcggtaaatgtaaccaatacgcacattagtgttttgtttaacaactttagccaatttaccgatatttttgtacaaatgtgccacccagactggggatacgctgctacagcagttccgcttttaattgaaacaattaaaatggctatcttaggaactgtgattggttcagctattgcatttgtatattcacttttaattgcgagaaatattgttaaaaataaagcagttacaggtattttaagagtgatcatgaacattgttagaactattccagatttacttttgggtgcaatttttgttgcaattgttggtatcggtccagttgccggtgttttagccttatcagtatttacttttggggtagttgttaaattgttctatgaggccattgaaaccattgatccaggtccaattgaagctttaactgctgttggtgcaaacaagcttcaaattatccactttgctgtgatgccgcaaattattacttactttatttcttatgttttatatgcgtttgaaatcaatgtcagagcttcaacagttcttggatatatcggtgctggtggtattggtctttacttgcaacaaactctacaagtctttgactatgctaaaactggtctaattattttaattattatcgtcgtcgtagttcttatcgactatgtttctactaaatctcgggaggcgttgatgaaataatggatactacaatgaaaaaactacctcctaaaccaattgacactaagaaaaaaattaagcattgggtaattgcaattgttactgtagctttaattatttggtcatttgtaggaatgaactttggtggaataaaagctaccgctggtcaaattgccggtgctattttggctggtattttccatccagattggtcttatgtatataacggaagcggcgaagatctaatttctcaattatgggaaacaatctgtattgctttcttgggtacttttatttctgcagttatctcattaccttttgctttctgggcagctaacacgcgccacaaaaaatggtatacttctcgttctggaaaaattgttttagcaattatacgttctttcccagaaattgttttggctttgatgtttattaaagctgttggacctggttcggcagccggtgttttagctttaggttttcactccgtggggatgcttgctaaattgttctctgaagcaattgagaaccttgaagaaggagctaatgaagctgttacagcagctggtggatctaagtttaacattattatgtttgcaacaatgccaaacttaatgccagctttaatttctaatactttgtaccgttttgacgtttcaattcgttcagcatctattctaggtttagttggtgctggtggtattggttatccattaattattgccttgcaatatcgtcaatggaaccgtgtaggtgttatcttagttggtattattgtcatggtggtcattattgactggatttctggttggattcgaaagaaattagtctaatttattatttaaacgagtggaatttttatctgctcgtttttatttttgtcaaattctaaatttttttgtaatatctacctataataatgataagtaaaggaaaaaaagaacttttttgttataatggaagttgtatttcaaggaggacaatgatggataatttaactaccatgacattggctgatgatattgctttatcacaagaaaaaattatcaacggtcaacaagacctgaataccaaaagaatttataatgaaattaatagtctaggcattcttgataagccaatcgaagaatactttgatatgactcaagatgaatactacaacagtgaatctgatggtaaattaactctacttcatttagatcaaccactaagtgaattaagcgatcgcattttgactaatcatgtagatggctatgttgataaggatgaaattaatctaacctataatcatgaagatccactgcaagatggtagctatgatcgtgctactgacttacatgtgcttttatatagtttgaaagttattggtgctgtcagagcaattgctccagatgacttaaaaaaggttttgtctaaagatgcggttttatcattgggtcttgccgcagctgctttggcaaaaaattaaccccaaggccaattaaaggcctttttttgtgtgatgagtggggaagagtatcatgaaaattatcaacaaaaccaagggtatgattgataagttttccgggatgactcggaagatgatgcgaaagaaaaataatgttccatttgacggaatgcaaaaatacatgactgtcggtgagtataacgttggagcgccagaaggcacgccacatggcgaagaatataagcttattgtttataaagatactgataatgtcttacatcaagctttacgttcagttaatgcgtctgatctagcaccagcttatgtcagaaagtttgataaaaggttaaatcggtatactgcctttgttaataagcgtactgggcgtcgttatattgttgaagatcagttagatcaattagtcgactatgtaaaaaagcatagtagaaatggctataattcgattaatattggcgttataactgatactcattataaagatgctgatagtgtagacttctatggccataacggtttaaggcatgttaaggaatttaattatcttgaagacaaagacattctagacttaaaagcacatttaggtgattggatggacgggtctgatccaggcttagtaggtgaggccgagttaatttctttatctcgaacatttcgttctaaaaagactaattttgctgtgattaagggaaatcatgatgaaaatgataagtttgatgaacatcatgatttaagggctagttttcctgaaaatgaattcgaagatattatgtggccaagcatgtatgcacaggatggcattcattacatcacgcgtaaacatggtgttgcatattttgataaagatgacgtcagaattattaccgttaatacttctgacttaccgtatgaattagacgagcagggaaagaaaaagtatgatacgaagctttctttagctattcgtgaagaccagatgcaagaaattatcgaaattcttgagaattcaaatggtaaaacaattatttttatgagtcatgctaaccccattactcgcaagggaaccaatgccctaaaattcaatggtcgttcgttacatgagttgatggttgcttttaatcaacatgaaaaaggctaccttaattctagagacgttcctcctgaatttaccttagctaatagctttgattttacgaaaattaagaatgcaaaaatagttgcatatttctgtggacaccgtcatactgaggaccaatatcggattaatggtatccaatatatattttttaattgctcggcccttatgggtccaaaccacgcgcttactacgcaatataataagcgctggaatagacagatggatcatgctaatgaagcagcaggctacattgtaaatgttgatattaaaaggcatttactacaagtatttggttatggtgcagcttctaagagaagattctatcgaatttagtttttgaaatgtaaatagcttataataagactactgtttattttgaggtgaaagttacttatgtgtggaatttgtgcgtttttcgatcctgaattgaaggataaagactgtgctattcaaggaatgatggacacgatcaagcaccgtgggccatcttcagatggaaaatatactaatgatcaggtggctttaggctttaggcgtttgtcaatcattgatctgcgtggcggaagtcaacctatttttaatgaagataaaagtagagcaattatttttaatggtgaaatttataactttaagccattaagaaaagaattaattgatgctggccatacttttactactaaggctgatactgaagttctacttcatggctatgaagaatggggaatggacggcttattgaagcgcgttcgcggtatgtttgcctttgtaatttgggatgacaatactaagactttatatggtgcacgtgacttctttggaattaagccaatgtattattcagaccaaaatggtaagttgatcgttggtagtgaattaaagagtttcttagcttatcctggttttaagaaggaactaaatactgaagcagttaaaccatacttgatgaatcaatataatgacttaaaggaaactttctttaagggtgtttaccgtttcccagcaggtcactggtttgaatataaagatggtaagatgaagactcatcaatactgggatgctaagtatgttgaaaatagcttaagttttgaagaaactttagataagatcaacgaagatttaaaggaaactgttgacttatacagaaacgctgacgttccagttggtgctttcttatctgaaggtattgattcttcttatttaactagcttacttgatcctgaagatgtcttttcagtttcttttgatgattcaacttataatgaagcatcaaaggctaaggcactttctgatttacatggctggaagtttttcgctgataaggttgatgcagatgaagccatgcgcgacttcccagaaatgcaatatcacatggatgaaccagatgctaacccatcaattattccattatggtacttgtgtaaattagctagaaaacatgttactgttgctctttctggtgaaggtgctgatgaattatttgccggctatgtaaactatggaatgcatacgcataacgacgtaattaaggtctttactgctggcttgaagaaattacctaagaagagccgtgtacgtttagctcataagatcaagaaaatgcctaactttccaggtaaagtacatatgtacactaacctggcagaaccaagcgagttttacgttggtcaatccgtaatttatgacatggattatccaactatctttacttctaaagatgctaataatatcttacgtgataagtacaagaacgatttgactgttaatggcatttatcaagaagatttcaagaaagttaagaatattgatgaagttaagcaaatgcaatatattgatcttcaccactttatgcttaatgatattgaacaaaaggcagataagatctcaatggctcactcattagaattacgtgtaccatatcttgataagaagattgccgaacttgctaattcaattccaactaagtatttagttaaccgtcatgatactaaatatgctcttcgtaaggcctctgaaaaagtcttgccagaagaatgggcacaaagacctaaacttggttttccaactccaatcaagcaatggcttaaggaacctagattctacaagcaagttagagaattgtttactgaagactttgtaaatgatatttttgaccagaagaagattgttaagttacttgatgataattataaaggcgatggatcagctcgtcgtcaaatttgggcaatttatactttcttagtatggtacaaattattctttgttgactatgatgaaactgttaaaaagtatcaacatgttcaaccagaagtggcagaattaatcgaaagtggcagacttgtttaattaaagttagagagaagtacggatacgaaatggtacaagcaaaatttactcctattttattaggtagcgacatcaatgtttatggaatggcacgttcattcaatgaagcctatgggatcaaagttcaagcatgggcagctagccaattagcagcaacgcgttactctaaaattgttgacgtagaagttcatgaaggctttgaagaagatccaggctttatgaacgtgatgaagcaaaagattgaagaatacaagaatcacccagaaccagttattttaattgcttgtggggatggttatgctgaattacttgctaaacacaaggatgaattaaaggatactttcgttgttccttatattgactatgacttgctagagaagttaatttctaaagagggattctacgaaattgctgaaaaatatggtcttccatatccacatactaagattgtgaccatggatgattacaaggccgaaaattacttagatttaccatttgattatccaattgaattgaaaccagaagatcctgtttcttggttgaattgtcaatttgaaggtcgtaaaaaggcatttactattcatgacgaaactgaattagtagatattgtgggcaagatttatactaacggttatactgaagacttgattttgcaagactttatcccaggtgatgattctaacatgcgtgttcttaacgcctatgttgataaggatcacaaggttaagatgatgtgcttaggtcacccacttcttgaagatcctacgccacaatcaatcggtaactacatggcaattttgccagcatttagtcaaaaactttatgatacagttcaatcattccttgagaagttgaactacacagggatggctaactttgacattaagtatgatccgagagatggagaatacaagttctttgaaattaacttgcgtcaaggtcgttcaagtttctatgtaactttaaatggctataacttagctaagtggtatatagatgattatgtagaagataatttaaaagataagccaactgtatatggtaataaagatggcgctaattacatgctttggcttggtgttcctaagaaaatctttaaggaatatgcttatgaaaatggctcaaagcgtttagctgaaaaattaattgatgaaggtcattatggtactactgtcttttacgataaagatcgtagcttcaaacgctggttattaatgcgttatatgttccacaactactatgctagatacaagaagtactatgaagtaaacaagggacaatactttgaagaagaagctaagaagttaaaaaagcaagcacttcgtgatggtcaacaagaaaaccatgaaaatgaaatttagttaagaaataccctctaagtagaatgacattgctgtagtgacccccgaacttcggacacggatttcgggggttttactatgtctaaattaactaaaaaagataaattgaatatttataaagaatggactattgaaaataaaagatcgacatatttaagtaaaaagtatggaataggctcagttagtattaagtacttagtttcactcattcataggcatggaatggatatattagataagccccatacttattattcagcccaatttaaactagaagctatcaatcgggttttagtcaatcatgaagctgcttactctgtatctttagaattgggcttgaaaagtcaagggatgcttattaattggattcgctcttataaagaaaacgggtataatgtcgttatcaagaggaaaggacgacgaacccgtgaacaaagaactagagaaattgaagaaagaaaacgaagaattgcgtcgccagaatttaaagcttactgtcgagaacgcatttataaaaaaattgaatgccttggttcaaaagagaaaaaaccaaccaaaacagaaatagcacaagctgttagagaattaaggctagaacttgggttgggtgttaaaactatcttatcgattttaaatgatctaaataatgatttacctggtttatctagaagcaattattacgatatcctaaagcgtgaagatcaagatgaaataaggcaccacagtctaattaaacgaattaaagaaatattctttgaacttaaagatagatacactgctccaggttatcgaacaataactgatcacttacatagtgaaggctttataatcaatcgaaaaacagtctatcgtttaatgcgtaaacttaatttgattggatatcgtatgaaacgtagaagacgctacaacagctttgagggtgaaattgaaggaagaattaaacctaacttaattaaacgcaacttctttgctattagaccaaatatgaagtggtacacggatattactgaattcaacttaagaggacaaaagctttatctatcgcctattatcgatggctgtgggagagatattgtcgcttataatatctctcgtagtcccaacttgcagcaggtaatgactatgcttgatgatgcatttaaagttaatgattcattgaatggattagtatttcattcagatcgtggctggcaatatcaacataagacttatcaatatgaacttgcaagacgtggcattgaacaaagtatgtctaggaaaggctgttctccagacgatgggcttatggaaggcttctttggcatacttaaaagagagatgttttatggcaaagaatcaaactatgccaatctgaatgaattagaacaagcgattaaagattatattcatttctataattacgaaagaacaaagagtaaactaaaaggactgactccgattcaatatcggaatcaatccttagttgcataatattaataaagtgtccaatttttgtgggtcactacatgcttagagggtatttttgtatctaaaagtattaaaataaagatgataggaaagctacttgaagaaagtaggaaaatagaatgattgactggggattaatggctctatgcatagtaacgatgttactaggattttttgagctgtaccgtacttttagattttataaatgggataaaaaaactaaagaaataccaactgcaccttatgtgatttattttggaacgttttttagtggggtattaattgtcgtgtcagctatgtttatgatggggaatacttcattaacacttcctaaaattttttacataattttgggaattattctagtagtcgtggcagttttaatgtatcgtcgtggacaccaaatggcgaagaaattaggtaaggatgatagtaacattgctgtttggcaaacttatttgattagcacagtaattttaattactggtttgattaattttcttagatgataaaggagagctgaaattcagctctttttttccaataaattgtggcttattatttgctaataattttctactttactgattatagaaaaagtttaaaattctcttctttcttgtctgacgtgaattttgctaaatacaatatatatgttttgaaaagtcaatacctacaatatcatgtagtttttggtagaatataaccatacatattgtgaaagaagagaatgaccatgttacaacaagatgctcaaattaaatcaattactcaaatgacccttccagaaacagccattaaaagagatggtagcatctatccttttgctctttacaaaattgaaatggtcttagacaacttgcatcttacgaaacatgaagcagatattttaccttctattttgaagaaattaaatggtgtaaaacaaacttctacgaaagatattgcagatgcctttgtccaaactttaacggaattaggatttgatgatgaagccaatgcttatgtggattaccgtagagaagatgaggccaattttgaaaagcaaacagaaactaccaaccgtctggatcgtttagttcaccatgatccaacgattgttaatgaaaatgccaataaggactcacgcgttttctcaactcagcgtgatttaactgctggtgttgttggtaagacgattggattgacaatgatgcctgaacatattgctaaggcgcacttacgtggtgatattcattggcatgatttagactatactccacttagtcctttaactaactgctgtttgattgattttaaagaaatgcttagtcatggctttacgattggaaatgccaatattgaatcacctcattcaattgagactgctacggcacaaatgtcgcaaattattgctaatgtagcttccagtcaatatggtggctgttcagctgatagagttgatgaagttttagctccttatgctgaaaagaattaccacaagaatattaatgaagcacgcgaattctttgatgatgaagaaaagatcaaggcttttgcaatcaagagaactaagaaagatatctatgatgctatgcaagctcttgaatacgaaattaatactttattttcaagtcagggacaaactccatttactaccttaggttttgggctaggaacttcatggattgaacgtgaaattcaaaaggctatcttgaagattagaattgagggtttaggtaaagataaaagaactgctatctttcctaaattagttttcaccttaaagaaggggcttaacttacatcctggcgatccaaattacgatattaaggaattagccttagaatgttcaactaagcggatgtatccagatattgttagctatgacatgattaagaaaatcaccggttcatttaaggctccgatgggttgtcgttcatttttacagggctggaaagatccagaaactggtaaagaagtaaattctggccggatgaatttaggtgttgttactttgaacttacctagaatcgcaatggaatcaaagggcgacaaagatttattctggcaaatctttagagaaaaagttcaaacagcacatgaagctttacaaattaaggctaagcgttgtactgaagctgttcctgacaatgccccaattctttacgaatacggtgcttttggtaaacgtctgaatgcagaagataatgtaaatgacctatttaaaaatggtcgttgcactatttctttaggctacatcggcttatatgaagttggtaccgtcttttacggaccaaactgggaacacaatgaagaagctcatcaatttacaattaatattgttaaagaacttcatgactattgcgctaagtgggaaaaagaagatccaaatcattaccactacagtgtttactcaactccaagtgaaagtttaactgatagattttgccgtttagatactaagaaattcggtaaagtgaaagatattactgacaaggaatactacactaattccttccactacgatgttagaaaacacccaaccccgtttgaaaaattagcctttgaagcaccatatccattttatgcagctggtggttttattcactattgtgagtacccaaaccttaaacaaaatcctaaggctttagaagctgtttgggattgggcttatgacaaggtaggatacttaggaactaacactccaattgatcaatgctataagtgtggttttaagggtgaatttaaggcaactgctaaaggatttgaatgtcctcaatgcggcaaccacgacccagaaacttgtgactgtgtaaaacgtacttgtggttatcttggtaatcctttgaagcgcccgatggttcatggccgtcatgaagaaattgttcatcgtgtaaagcacttgaacttaggaatggaagaaaaaatggctaaggatgaagttagaaagaatgacgaatattaatgccagaaaaagataaaaacagtcaagaaggtcctgatgttcgaggtaacttaattaaagttaatgttggcggcgatacaatttttgttgattctaaccaatataagccacaagttgaacatgctaaaaaattaaagcagcaacataggaaacctaaaaatcctaaaccacaagaatggatatcggaagaatattctaagcataaaattgcggactataaaccatttaactttgttgatggggaaggcgttagatgcagtttatatgtaagtggatgtttatttgattgtcctggatgctataatttggcagcgcagaactttaattatgggcgtccttatacacaagagttagaagataaaattattgaagatatgtctcaatcttatgtgcaaggattgactttattgggcggagaaccatttttgaatacttgggtttgcttaaaattaattaaccgcgtccgcaaagaatttgggcatactaaggatatttggtcctggtcaggttatacttgggatgaactccaaaaagagactccggataagaaagaaatgctttcaaaaattgatattctggttgatggacgctttatggatgacttaaaggatcttactttacagttccgtggttcaagtaatcaaagaattattgatgttcaaaagtcacttaaagctaagaaagtcgttatttgggacaagctagttagataagtttgatagaataagggaaacgataacgtttctcttatttttttaggtgaaaaagatgcaagaaaaaaatttgaaattagtcgataaaataatgacagctcttcaaaaagtagaagatcctgaattattagttgatgtggttaatctaggcttgatttatgggattgatattgaaggagatcatgccacaattaagatgactttaacaattgttggctgtcccttatcgacatatctacaaaattcaattgaaaaggcagttttgtcggttcctgagattaagacctgtgatgtgaaattagtttggtatccagtttggagtccagaaagaatgacgacagctgctaagcagcaattagggatgcttgataatgaacaagctcttgaccaagaagaagagattgaagacaccgaagaaaagcaaaagatcattgatttttcagtgccgattaagaaactagctgaagaatatccggatttcgttcaaattatgtatgattgtggttttactagaattaaaattccgggcttattatcaacagtcggacgtgtgatgaccattccgcttggagcacaggctatgaaaattgacttggataaaataaagagggcttttgaaaataaaggctacaaggtgattgataaatgaaagaattggataaacaacgccaagaatccattttgaaaattttaaattttattcaaaatggcggagaattagaagaagctaaaaaaatgtttcaagctgcttttgatcaggttgatgtggctgaaattacagcagctgaaagagagttaattgctcaaggactagatccaggaaagattcagtacttgtgcaatgttcatgcggatgtttttaaaggcaatattaaagaaaataaagaaagtccagagtttgaaactcctggacatcctgttcatacttttaaactagaaaatattgtaattaaatctttaattaatgatgccttgcttcctgatttgactaagtgggaagatggatcttctgatgctctacctaaattgaagcgagagttaaaagatctggctaaaattcactatcactatgcccgtaaagaaacttctatgtttccaattatgactaagtatggcattactgctccacctaaagttatgtggggtgttgacgataaaattagaaaattaattggtcaagctaatatgcttgttaatcaaaaaaatgtggaccaaagtgaagttgctagtgtaataaaaagtgctgctcatgaagttcttgagatgatttttaaagaagaagaaattatgcttccgatgattgatgaagttgctagtgaagaagactggggcaatgttaaaaatgaagaagagcaaattggctatactttgattcaaaagccgatgaactggaagccgaagataaaagaaaaagtagccgggccaatctctttagataagttgagcagtttagcgctgaattttgcggaaggtagtttaaatttaaaacaattgtcggcaatcttagatttattgccatttgcgataacttttgtcgatgaaaatgataaggttgcatattttggtggtggagcaaatatttttccgcattctaaaaatgcaattggaaacagtgtatattcgtgccatcttcctgagagtgttcctcgggttaagaaaatttttgatgattttcatcaaggaaagaaagataagttcgaattttggttcgagccacggcatatggggagatatttatatttgcaatattttgctgtacgaaaaaatggacggtacttgggatgtttagaagttgctcaagatgtaactgagattagaagctggaaaaatgaaagaagataaaaaatagcttgcattttgtagtgccccccgaacttcggacacggatttcgggggttttactatgtctaaattaactaaaaaagataaattgaatatttataaagaatggactattgaaaataaaagatcgacatatttaagtaaaaagtatggaataggctcagttagtattaagtacttagtttcactcattcataagcatggaatggatatattagataagccccatacttattattcagcccaatttaagctagaagctatcaatcgggttttagtcaatcatgaagctgcttactctgtatctttagaattgggcttgaaaagtcaagggatgcttattaattggattcgctcttataaagaaaacgggtataatgtcgttatcaagaggaaaggacgacgaacccgtgaacaaagaactagagaaattgaagaaagaaaacgaagaattgcgtcgccagaatttaaagcttactgtcgagaacgcatttataaaaaaattgaatgccttggttcaaaagagaaaaaaccaaccaaaacagaaatagcacaagctgttagagaattaaggctagaacttgggttgggtgttaaaactatcttatcgattttaaatgatctaaataatgatttacctggtttatctagaagcaattattacgatatcctaaagcgtgaagatcaagatgaaataaggcaccacagtctaattaaacgaattaaagaaatattctttgaacttaaagatagatacactgctccaggttatcgaacaataactgatcacttacatagtgaaggctttataatcaatcgaaaaacagtctatcgtttaatgcgtaaacttaatttgattggatatcgtatgaaacgtagaagacgctacaacagctttgagggtgaaattgaaggaagaattaaacctaacttaattaaacgcaacttctttgctattagaccaaatatgaagtggtacacggatattactgaattcaacttaagaggacaaaagctttatctatcgcctattatcgatggctgtgggagagatattgtcgcttataatatctctcgtagtcccaacttgcagcaggtaatgactatgcttgatgatgcatttaaagttaatgattcattgaatggattagtatttcattcagatcgtggctggcaatatcaacataagacttatcaatatgaacttgcaagacgtggcattgaacaaagtatgtctaggaaaggctgttctccagacgatgggcttatggaaggcttctttggcatacttaaaagagagatgttttatggcaaagaatcaaactatgccaatctgaatgaattagaacaagcgattaaagattatattcatttctataattacgaaagaacaaagagtaaactaaaaggactgactccgattcaatatcggaatcaatccttagttgcataatattaataaagtgtccaatttttgtgggtcactacattttgcaagctattttttgtttggaatctattgtgtgttatgttaaaaatgtaatctgtaaaacttaattttgttttccattagtttacgtgaatgtcaatcataacttttatttaatctttaaagtatatgtattggaaattcgtaataatgtaataattgaaaaaattctagtataataagaatagcaatctctagagttaatactgataaagtagtaaattgagttgttataataaattaatcaaaaatcctataagaattatttttaacgcgttaaaataactatagaaatcttataactattaccaatttaaaattgaagggacaggctaaaatgttattcaataaaaaagactttgattctaaacaacgttttagtattagaaaattgagcgttggtgtttgttctgttttactttcaactttatttctaacttttaatgaaggtcagacagttcacgcaagtacggatgctaatgcggcggacactacaacgactagtgtatcatctaatactactaataatagttctgataataatactgataaaaaagatgactccaaagtagagacatcttctttggcaaccgctgaaaagcatgccccaattccaattgctgctgaagttaagagtaacaagtcggaagatcagacaaatagtgcaactactgaaactgctactcaagtaagtaaatctaagcaagcacaaagtcaaacaactactaatattgttaaagctactgctactcaagcatctacttcttcaaaagatagctctgacacaacaaggtttaaggataattctgcccaaaatactgttgaaaaaaatagatcaacctcaacttcaaaatatacacctgtcttaactagcgaaacttccgtttctactaaaactaatcaaagtaatagtaattctgctactcaagaaaaatcgaatattaaacctgttaccccacacgctgattcaactgaacatattgcaccaaagacttacagcatggatagcgactcacctgcttatgtagttgctggaagtgatttaacgaatttggcctcaaaatttatttccaatgcggatgtcttgactcaaaatggggctactttttcttgggttggcaatgtcccgactccaactcaacaagatgccattggtggtaatacaataactggaactattaaagtaacgtataaagatggcacaagtacaactattgatattgaatcttacgttgaagcacgatcagagcttcaaccaagtaccttctactacgtgaatagggttggcgataccccagactttaacaccgccgatgctaatggcaataacttttctacaattcttaaaaatacagacgtatatgatccgactgctttttcttataagatattagggacactggatacaagtagtttaggtatccactgggccaatgttcaagttacggataacaatacttttgctggtgcaccagatgctcctaaagttatcggtggcctttatattgttaaggttccttacgtagttcagggacttaaattgaaggataatattccaactgatgctaacggtaatcctataattaatgctcagttggcaacaatgccgaagtcaacatctacgacaccgacaacaccggaggctgcttttgatcctgtccatggaaattctactaattttccagcgggcttatggggacaatatttctaccaagattatgctttggcttatgcgctaggtatcaaagtgcaagtagctgcagatgacctagataataatggaaagtggaaaaacaaaccaacggatttagtcaatactaagaccaaccacttcgcaatgacttttaacaagttgcctaatgctacccagcaggaagtagacgtaaattacgtatctgctccacatgctgaagatatgtatatctataatgccgcaaacaaaacttatatgactggtcgaccagaaaatgctcaagcaattaaggaattgcttgctgacggctacatgaatgataaagtttgggtaacgttagctgatggcactaaggtctatgcttctaaacttgactatcttaataatggtaataactttgttgttggtggtgcaaaagccggccgatacaacattaacttcaatgctagttttgaccaaaaaaatagcgctggtcaaccacagattttttcaaataacatttttaatacagcaagtgctgactttaatgatgacctaaataagtggtatcggaagactaacaatcagacggttgctaattatgctgcacctactgccgcaacctgggataaggtttcaactaatgggatttccttagcaccaacgatcaaagccagtgatgatccctacgaacaagatttaaccgacggcccagttacttttgatagtgaggcacttaaaaatgtggttaaaaatccaagtacgggtgcagaggtgcgtaaagttcaacatacttggctagctaatatggtccctaactcaattctggacaataacacgaaatggccagaaggtactaaactcacttgggctggtaatgatggcagtaccaaattaaccttcgataaagccggtgaaagcaagaccgggaacgtaacaattactcttccaagtggttcttcatacacggttaaagacattacagttatctctaaagctaatgtgatcgcaaagagcgaaactgttgactacggtaagaaactaacagcagcagatttggtaactaaccagaatgttttcccagcaggcacgacttatcaattcgtagatggttcagaaccaacttgggggacagctggctcatacgatcatgttaaaattacagctacttacaaggatgctagtggggcaagtgttaatacaccagttgcaaactgtgcagttgctattaacgatagccggagcattaaggtattagctggtagtgatgttccttcagttgatagtgttttgaacttgcctaacaattgggaagagcacactgcattctggactacgccaattaacactactgcaactaatgaaggtttaattacgattcattacccatcaagcaatttggatcagaaaattaaagtttatgtaactgttattccgaagaccagtgcagttgatggacaaaacttctttactaatggtaataagtacgatggtacagagggtagcattgctaacggtgctaaccaaggtgcaattttaacccaagctaatggtcaagcaattgactacactacttatagtggttctaatacaccgggaacgcaaacatcttatgatacgaagacgaccagttacacaccaacttacggtctgtctggacttcagaccaatagcgatggcagtttagttagcggcgttcaaaccgcaactgttcgcgtgtctgtacctaagggtacgattggtgccaaagtagatgctgatgacaattactactatgaactaaacgctaaagtaaatattgctcaacctgttacttttgagtttgtagatgaatataacaatgatcaagtagttggtcagacctactcacaagaatttgtgcccggaattgatacaaatctcaatttcagtatggctatgccagatggttatgaactaggaaatggtgcttcaattccaagtcagtatactttgcctgcctttagtcaaacgacaccggttgtcaaagtacctattcaccagaagatgcactttctatattactttccacgatgaagattcaaatactaatcttggtacggtagaagtgtcaggcagtgctgcagcaggaactggtggctattatccaagcattaacacgaaattaacattcccagcaggtgctgatgctggtgactattattctgtttcaacttctggcgtgccggatggggtgcagttagttgggagttacggggtatcgcttaccaatccaaccgccgattggacaactccaaactatcagtgggagaatactttctccgttcttaaggctttaaccggtgcaacgatgaccattaatcttaagcacaagtttaatgaaacgcaagaaaaacagacgcgtactgcaacggttaactatgttaaggctaaagttaatgcggatggtacttatacccaagatggcaatgcatttacttctgctgtccttgatgtgtactactcaagaactaagtcagaggatctggttactaagaaaatcacttatactccatggctgtgggatacaaatcaaggtgatagaacaactcctggttatcatgttgaatctggtaagtggactagtcttccacagcattgggcagctgttgttgcagatgtgccgacattagctggttacactgctgctacagttaccgataagtccggcaagccagcaaatcaatttgtttttccaacttggaatggatcatatcaagatacatctaatattaataaggaatccttagcatatactgagaacgccccaatttatgaagcacgtccagtccatactgttttgtatattcctaatgaacagcaagcgagaacaataactgctaaatatgtaattgctggtggcaataataatggtcaaaagtttgcacctgattcgcaaattcaaatcttctatggccgaactggtactttaaatgttgccaacaataagattacttatggaaattggcagtgggacaatacagcaggcgatcaagatacacctggattccacgtgatttcaggatcgtggagtttgcctacaaatggatcgtcttggcaagttaatattcctaattcaggtaacgactatgttgttgcaaatttacgttatgatggagcatattcaacttttactttagcagcgccaagttataatgctaatgatgtgtttactagctctacaagtgatcaatggttcacccgtaatacattagttacttactatgtgccaacttcaatggtgaataaaacagtaacgcggacaattacgatttttgaacccggccaaggtagtaagaccataactcagactgctaaattgactagacaggtaagagttaataacgatgataccggtgttgtttatgatggctttgcaggtagcggctggagtactggcacttggggagctcaagatgttacaactcatgacggctacacgatgtctgcaacccaaacagttaatggagttactactccaattcaacttgttaacggtcaagttccagctgaagaagtcgatggtaataccaaaaatactacaattaatatcacttggggtgctgtagctacagctacattaactggtaatggcactagtacttataatggccaagctattactaatgctgaacttaataatgctttgaaagtgaatgttacaggaccaactgcaggcgcaggtacgtatactcttcaagccggcgatgttgaattttcaactgatggtacaaactggactactgccttaccaatcaatgctggcaactatcaagttcgtttaactgctcaaggtaaaaatggcattattgctaaatacggcaacaacagtattatttggactcaaaatggtcagtcaactatcaccagcaatgcaacttacatgattaataagcttgctggtaatgccgtgatgactaatgcccagatcggcaattacgagatgacttataatggtgctgctccaagtacaattgatccaagtaagtttgtctttacaacgactgtcaatggtcaaaacgttgagcttgataccactggcttagatagcagcgactttacttgggttgatagcaatgcaccagttaacgtgggtacttacaaggttattctaactgatgctggtttagctaaattaaatgttaataatccaaactttaacctaagtaattctggtaatggtactttcacaattaaccaggctaatgcttcagctactctttcaggtagcgcaagtcgtgaatacaatggtcaagcagtcagtgttaattatctcaactcaactagtactggtaacaacattactttgaccttgcattatccaaaggatggtaatgctaactattcaactacagttaaattaaatgctggctactttacttggaatacaccaaatggtcaagctccagttaatgtagatagtcaaccttatacaattagtttgaattcagatgcaattgaaagaataattaaacaagctgttggtaacggtcaaaatgatgtaagtaacgttaagtttgctagtgatgcaattagtggtagtgcaaattacacaatcacaccattagaaagttcagcagaactttctaatattactaatggtaattacacgaaagtttataacgctgaaactactaaccagattgatgcttcgaagttgcacattactgcaaatcttggcggtcaaaatgtggacttagatactacaggaatcactggtagtgactatcaatgggttgatgcaagtggtgcagaattgacttctaatccaaagaacgttggtacttactacatcaagttaagcgatactgcttttgctagattgcaagcacaaaaccctaacttcaaattgacaagtaacgacggattaggtgtttatacgattacaccagctactgctaatattacttttggcggtactaactctcgtgtttataacggtcaaggtaccactactacagaaattaacagtaacggtcaaattaaagttcactttactttcccgggctcagttttagatgcctcttatacgcttaaagatcgtgattattacttggttgatcaggatggggctggttatgatggtgctcaaataattaatgttggtacttatacgattaagctgacccaacaagggatgcaaaatgtcattgatacgattcatcaactatcaggtagtggcgatggcggctataacattaatgttgactccgcaactcaattgggtaatttgacttcaacatttgatattgttccttcgcaaaatacgattagcgtttctggtacacaaactgaaacctacaatggttcaccaattaatgttgtctacaatgctgatggcactaacagtgtgaaggtttcaatcgctcaaactagtggtaataccactggcgctgtcgcaagtttagccgatgtagcccttgattcaggtgactttgcgatcgttaacggtccagctgaaaatgcaggtagctatcaagttaagttgactgatgctggcttaactaagattcaaaatgcagttggcgataactacagcgtaagtcttgccgacacaactggtacactagtcattaataaggcaaaggctagtgcagtcttcagtggtgatccttcctacacttacactggtacgccagtaagtgctaatgattacttgggtaaatactcaatcaagttaactgaacccaataatccaacttataacttagttgcaggtgatattgaattcaaatttaacggcaattggaccacccaagctcctgttaaagttggtcagtatgaagttcgcttatcgcagcaaggttggaaccacattaaggcaattaatagcgataacgttgaatggtctgctactgcctctgcaggaactggcacttacactattaatcaggctaaagttaccgctgatcttagtggtagcaactctatgacttataccggatcagcggtaacgacaaatgatttgtatagtcaagattcaacgatcaaggttgtaattaatggtactgatattactaacttgccacagacctttgaattaaaagatggcgactatgtatggcaaaccactgctggtcaagcaccaaaggatgttggtaattatcagattaagttaactgctgctggaattagtcatattcaaaagcagattaatgatgcattgggtgcagggaatgttgctttgactactactgccgataatgctggtactgcaaattttgaaattaagcaagcggtagctgaaaatgttcaactgtatggggatgaacaatcaacttatgatggagatacagtaacttttgatccaactaaccttgatgtgaagaataactttggtttccacaacgttgaaggattgactattcctaacttcacgagtgcagactttgattggtatgatgctaatggtgaaaatagaattgccgcaccaaagaatgcaggacattacaccttgaagttaaacgatcaaggaaagcaagtcttggcggatgctaacaagaattacacctttgttgatcaaaatggcaaaagcaccatctccgggcaaattacttatgtagtaaccccagcagaactcgtagttaaagttactggtaaggcttcaaaggtctacaataatcagaatgcaaaaatcacgcaggatcagatcaaccagggtgacattaagttagtttggggtaattcaactactgaaccaactgatttaggtgaatttactttaactccagatgatcttgaagttgttgatgcaagcggccagcctgctatccatgcaaactacgtcgatggtcagcaaacaggtgacacgtattatgtccggttaactgctgatgcgcttgctaagattaagcaattaagtggtgctgctaactacaatattagccaagcaactgatacggcaacttaccaaatctacgctcacaaggctgaattaaccttaaccggtaaccaaaccactgcttacggtactgaattgccatttaatgaaagcaagtataccttagacttcactaactgggttaatacaaacattcccaaaccagttattacttggcaaaacggtgaaatgctcattaatggtcaacaacctgaggatggctatagctaccacactggcgacctctatgttgaaggttattcggacggtggcgtaccaacgaatgctggatcgtacaaggttaaaatctcagctaacttaactaaagaactgcaaaagatattccctgattatgatttttcaggtaatattgattctagtactttaaactctaataagacggttaataatgatccagttgaagcttcacatgaacctgctagctatgtgattacgccagctgaagcaaccattacgattaatggtgctcaacacgtgaagtatggcgaatcaactgcaattgctggtgatcaatatactgctagcgtcactgcaccggtttctggcaatgaaactaatgtagtaactgatgtggctttgactagtgatgatttgacgactgtaccaagtaacgcgggcgttggtagctacacaattaagttgacccctgctggtttggcgaaaattcaagctgcaattattggtcatggggatgtaaccaagaactatggttggacgcaggcaggcaatgcaacggctaacttcttcgttgaccaaatgccggtaacgattacggttagtggcggtagaactgtaacttatggtacgcaagcttggttgagggcaattaaggctaacccagctggctacactttgacggttacaactgaaaacggtactaacttaagctacactgctaacgatggtgacttagtctttaaccaaacaccaggcaatgttggtgaataccaagtagaattgtctgcgcaaggtttgactaacattggaaaagcacttggtactaattacgcatatccacaaatagctgctgatgtaactgcgaagggaacgttcactgttaaccggggtgcagttactattacccttaaaggtagtgacggtaagccttataatgctcagcaaaccttaccaagcggacttaatttaagtaagtatggcttagactactcggctacggtttactccgctgatggtaaagcccagatgcttaatttgaccgctaacgacttgcaaattattggtaatgcaaccaatgttggtacttaccaagttgaattgtcacaggcaggtcaagaaaaaattgaacaactaactggtaataatggtgctaactacaagtggacgtttaagaccaacgctgattatgtagtaaaagcagccacagctagtgcagaacttagcggttctaaccaaaagacttttgatggttcagcagtaactacagctgaagtaaatagcaatggtcagattttagtccaccttacttacccaggctctaatgttcaaagtacttacactttgcaagacggtgactacacttgggagactgaggatggtcaaacaatttctgcaccgactaatgctggcacttacaccattaagttgaataagcaggctatcttagctcacttacaagttgctctgaaccagcaagctggtttaggtgacaatgatcagcctaatgtgactgtttcagcagataaactaagtggtcaagcaagctttaaaattaatccacaagcacttactgacgtaacaatttcttcacctgatcaaagtaagacttatgatgctcaagtagcggatcttgatgttaatggaataactattactgcaaatggaatcgttgctaataatccattagtaaatccaggtattagcgctagcgacttcatttggtatgatgaaactggtaataagcttgaaagtgcaccagctgatgtcggtacttaccaggcacgcttgaatgcaagtacacttgctgaattgcaaaacgcaaatccaaactatcaatttagctctgtaactggtttgattaactacacaattaatccagctcctgccactgcaacaattagtggttcagctactcgtgactacaatgctcaaactacttctgtttcagatgtaatgaacaatatcaagtgggatgcaacaggtttagttaccgaccaagatcttaaccttactggtttaactgctaatagttatgcttggtacagtaaagacgcggacggtaattacgttgcaatgacaggtaacccagtaaatgatggtacttactacttgcatttgactaagagtgcaattgaacaagtaaaagctgataattcaaactatgactttacatcagtaaatggagaatttacttacacgattaatgctgtaaatggtattgcaactctcagtggctcgtcttctaagacttatgatggtcaagctgtaactactgctgaagtgaatagtacaaatggtgatattattgttaactttactttcccaggatcaagcgctcaaagcacttatgttttgcagactggagattacacttgggagaataaagatggtcaagtaataacagcaccaactagtgctggtacttacactattaagttaagtgcagatggtattacgaacttgcaaaatgcaatcaaccaatatgctggacaaggaaacgtaactttagatgtacaagatcttttgggtgctgctgtttacacaattaagcaaaaagctcttgatgtaatccttggtaataatagtactggtacagatggcaagacttatgatggtcaggccggagtaatcaatactcaagctgtaaactttggcgtatttaccactagtggactagtaaatggtgaaactttgaatgctgctaacttaactagtgatgactacgaatgggtagatgtaagtggcaacgcaataacagcaccaattaatgctggtacttactatattgctttgactgcaaatggattgaagaaattacaagctgataatccaaactatgtagtttctgaaagtggccaattcacttacgtaattagtcccgctgaagaaaatgtcacagtttctggtagtcaggaaagtacatcaacttcaattgatagtgccaacttcacagttcatgctccagcgggtgttacagttccagcaggcatgacttatgagtttgcaactggagttccatctgaatctggcgtttatgtaattaaattaactccagaaagtatcactactcttgaaaaagcaaatccaaactacaagctggatatttcttcagatgctaaatttatcttggacgcaattttaaatattgagtttgaagatacacaggatggtaataagcaagtcggtaagacaattactaagacaggtgttgctaattcaactatcaatgatcttaaattagttgttcctgaaaattacgaattagctccagatcaagaattaccaactagttatacttttggtaagacattgaatcaaaacatgtatatcaagttagttcataagttgaatgagcttaatccaactgatccaagtactaatccagatccaactaataagaactggttcagagaaaatggcttagttaaagacattactcggacgatcaactataagggattaagtgacgatcaatttgcacaaattccagaagcccaaaaagttcaaactgttgagtttacgagaactgctaagtatgacttaattactggtaagattgttgcaaatagtgaaggctcatggactgcagtagatggtaaagatacctttgctggctttactccatttacttttgctggatacactgcagctcctgctagggttgagcaagtgaaagtaactggtgatgataagaatagtcagattacggttgcatacactgcaaatactcaaaccggtaagatttcttatgttgatagtgatggcaaagaagttggtcaaaccgcattaactggtaagactgaccaaagtgttgaagtaaatccagaagctccgacaggttggcaaattgtttcaggtcaagatattccgaagacagtaattgctactccaactggagtgcctacagtagttgtgaaagtagaacacagcacaattactgttactccaggaacaccagaaaaggatatcccaactggtccagtcccaggagatccaagcaagaattacgagaagttgggaagcttaatgtcaactccaactcgtacaattgtggtaactgatccaagtggcaagcagacaagggtaactcaaaccgtcaacttcactagaacagcaacgtttgatgaagtaaccggtgaaattacttacagtgattggaagaattctgaaccagcagaatggcaagcttatgcagcaccagaagtagcaggttatactgcaacttcgagtgtcagtgcaaaatctgtgactgctgaaactaagaatgaaacagtaaacatttcttacactgcgaatactcaaaccggtaagattacttacgttgatggtgatggtaaagaagttggtcaaaccacaatcagtggtaagactggtgaaactgttaaggtaacgccagaagttccatcaggttggagaattgttccaggtcaagatattcctgaaacgattacagcaactgcaactggagtgccaacagtagttgtgaaagtagaacgcagcacaattactgttactccagaaacaccagaaaaggatattccaactggctcagtcccaggagatccaagcaagaattacgagaagttggcaagtttaacatcaactccaactcgtacaattgtggtaactgatccaagtggcaagcagacaagggtaactcaaaccgtcaactttactagaacagcaacatttgatgaagtaaccggtggaattacttacagcgattggaaacttcaaaagtcaaatgctgctagccatgtagctcaatgggatagttatactcctcaggttattactcactatgttccaagtgtagctgaagtacctgctaaagtagttaatgcacatactgctaatagccaagttgaaattacttacgctcctgcttcagaaagccaagtaattcgttacgttgatcagaatggtaaagaaattagtacccaaattgttccaggtaagtacggtgtagatacaacatttacgccaaaattacctaacaactggcaagctgctaatactattccaacttcaatcaagattggtgaaaatggtggtttaactacaattgtcgttgaagctaagactgaaaaagtacaacaagctaagactgttactgaaactatccattatcacactgctaatggcaaacaattatttgctgataaagaaatggaagttaacttctttagaactggtgtaaagaatcttgtaactggtgagattacttggaataactggaacaaagataaagaaagctttaatgaagttccttctccaaaagtttctggatacatggcttctccaactaaagtcgcagttcaaactgtaactcctaactcagaagacctagtattcaacgtaatttacactaagaattcacaaactcatccaacaattccagaaaataaaccaaataagccacaagaagaaaatgtttctaagcaagaaactaagactcaagataaactcattcacgaatatggatataagaaacgtgcagatggtcgtttagtagaccatactggtcatgtatatccagcaagtagcaaagttaaagaaaatggagctatctacagtgaaaagggtgaactattatcagttggttcaagaagaaaacatgaattgccgcaaactggtcttcatgacaatagtttaattgctgcaattggatcacttcttgctggtattagtatctttggtttacttggtggacggaagaaaaaggatgacgataaataaaactgaataggttttgaaagaggcaatttgcctctttttttttacgctcgtgcaaaatagttcattaattgctagactgaatgtaagagtcttagagaaaagggtgaaaaaagtgcacggtaaacagaatattcaaccagatgatgaaattaagcttcattggctcctattaggtgagttatttacctggattggagctagttttatctggccattgacttcagtttatttaaataaaaggctgcatgtatctttggcaatgattgggattgtgttgctctttaactgtttagctaatatgcttggctcctttgtcgcaggttgggcgtatgatcatttcaatccctattatttaattattgcaggagcaggtttagatgccttagttttgtttggaatggctgctaatcatacttggccgatttattgggtctggatgactttaactgggctacttggtggctggaatggggctttaattaattcaattgcaactagtattaagtctaagcctggcaggtatgtttttaatacgatctattttgcacagaatctaggtgtggtacttggtacattgatcgtgggttatatttacgattattccgttacgattttattcgttattgcagctagtcttttcgtgattgtatgtataaactcaattattaattatcgtccaattattaagtttcatttggaaagaaaagctcagcaaaatactaatagtaaaaataagaccacaccaatgccgggtgctaatttgaaattaactattggcttttttactactctagctgtgatctggttaatgtacatgaactgggaatctaacctttcagtttatatggtttctttgggcattccatttcatttatatagtttactttggacgattaatgccagcattattgtgattgtacaggcttttttaagtcgttttcctaatacttttaagaatttattccatcaggttgtgttcggagttacaatgtttgctatctcttttgtgactttaattttcgcgaaagattatgcgcattttgtgttttcaatggttactttgactttaggtgaatcaactgcaatgccggcaatgccagcttatgtaaatgatttatctccagttgaaagtaaaggaaaatatcaaggattaacgatttcaacgtctgcgattggtagagcgtttggtcctttatttggagggttagtgattgataagtttggctatatcaatttctttattgtagctgcagctggaatctttatgatgctggcaattatcgtgccacttcacgcacagttgaaagataagctgaaaatatttaggtaaacttttacatgatttttctcattagatgaaaacctttacagaatgtaagcgatctcttctatttgtgaaagcgccatcttataatatagatgtgcggttaagtaaaaggagatacataatgagaaaaatttcacctgaagttgcaaaacatatggacaatttatctaatgaagctggagtaatcagcgcattagcaattgaccaaagaggatcattaaagagaatgttagctgaagcagcaaataaacctgctgatgaaacaacaatcgtagattttaaaaaggctgtttctaaagaattaacaccatatgcttccgcaattttaacggatccagaatatggtcttcctgcaactaaggtaagggataagaattgtggtttattactatcttatgaaaagacaggctatgataccactgaaccaggcagaatgtgtgatttgattgccgaccaatcagctttaagaattaaaaatgatggtgccgatgcagttaaattcttgctttactacgatccagacgaaagtgatgaaattaatgataagaagaaggctttcgttgaaagagtaggagctgaaactaaagcaaacggtcttccatttttccttgaattattaacttatgatggcaagatggatgacgttaagagtgaagaatatgctaaagtaaagcctgaaaaagtatttaagacaattgaagaattttcaaaacctcaatatgacgttactgttcttaaggttgaaattccattcaatattaagtatgtagaaggcttcaatggcgacaataatgttgtttatactcaagaagaagcaaagaagttgttgaagaaacaatcagacttaactgatttaccatacattttcttatcagctggtgtaacaagtgaagaattcattgctgaaattaaaatggctgaagaagctgatgcagacttcaatggtgttctttgtggacgtgcaacttggaagccagcaattaagccttttgctgctgaaggtgaaaagcaaggtagagaatggttatcaactgaaggtaagcagaatatcgaaaacttgaacgatgcacttaagggtgctaagtcatggaaagataagctcgaagttgaagattaataaattattttaataactaatgaaaaacaaggctagaaatttagccttgtttttttgtggaaaatttagcttgatttttatatgtaaaatgccgatgtttatgcacttgaaaagctatttataagttattagaataaaagagtaatgttaattggaggagaaaaaaatgaaaggattaaaatacacaagtttagctgtggcagcattaactgctactattttggcaagcaccaataatggtaaagtccaagctgcatcaactaatgaaaatgatactgttactgtagcaaaatcagataaagaaaaggctcaagcagctattaaccaagcacaaaattcagttaataatgctcaaacagtcgttgatagcaagaagagcgcgttaactgatgcccaagaaaaggctcaagcaccagataatgcttattctgctcaacaagctaaagtaaatgacagtcaaaagaatctttctgctaaacaagctattgcaaaacaagcacaagataaattaaatagtgctactgaaatttcaaagcaagctactccagaaaatattcaaaaagcacaaaagaatattactgttcaacaagatgcaattaaaaatgcgcagcaaaatgttaatgatgcaaatgcagatttgaataaagcacaagctcaattagcaactgctaagcaaaaacaagctgatgctcaaaatgtagttaatgctaaagaatctgctaaacaaacagccgataagaatgttgctaaggcagaatctgatgttaagaacagcggtttagatgaagcaaagcaagacgttgaaaaggttcaaacgacattaaacgacattaaaaagaccaatgctaataatgaatctattttaactacaaataagtctgctttaactgaaaacaatcaaaagatagcaactgttaataataagattgcaactgcaaatcaagctgtagtagatgctcaaaataatgttaatgctaagcaacaagcattggctgatgctaaaaaggctttaaaagatttacaagatcaagttgctaaagatcaagcaagtggtgcggctggtttctttaagtcaattgccgataataaagataattctgaaagtttaagagaagatgcacgtactgcatatgatattgttactggtaagccaaatgcttaccaagatattactgtaagatgggttaaacaagctgttgagttgggtcaagaaaaagactctacttcattcagtaatatggaaaaagctctaggatattatgaacattggatgacataccgtgataagtatggcttgagtcatccatcaatttctttaactgctgttgccattgcaatgcttagttctgattttcaacattactctgatgaatttaatcaccctattttattaactgctaaatatggtccattttatgaagatgaagaagatatatcagctggagacgttaatccaattgataactggatgagtgaaaaagaagatatcgataactatattaaggatcatccagatgcagctgcttatagttttgaaagtagtcatccattaactgaagatgattgggcaagagatgttgatttctggagtaataaaccagtagatattggtcactatacttctatgataaaaccagatgccaactatgttggattagctggaaatgaatatgagattgaaccattcatggataatgcagatagcatggatgaaattgaatttgatccaattaacggtatggacttcaatagttaccaaaatctagttcactcatatttgcaaaacattaaacaagaagatcaaattaacactcttaaagctaacgtagaaaccgcaagccaaaacttaactgctgcacaaaatgccgttcaagcagcccaaaacaatgttaagagtttacaagctaacttagcagaattaaacaatggttctactaagattaacaaggcaattactgatactcaagatgctcttgcaaagggcagagaaaatctcgaatttgaacaaaagcaactagatcaagcaaacaagaatttagcagctgtacaagctaaagttggtgcaaaggcaaaagcattagatgacgcaaaagctgctcaagctaaggctgccgatgctttagctcaagctcaaaatgttttagctggagctactgctgcagtgaagtcagctcaaacaactgttgataatgcacaaggcaacgtcaatgccaagaacaaggatcttaaggctgctaaagcaagtctagaatcattgaagcaaacattaagcagtttagaaagtgccaaggctaacttagcaagtgctcaagcagctttaactgccgcaaacaatgatgtattaacagctgataaagatgtaaaagcgcaagaattaattttagcttccctagaagaagctaagggtaaatcagatgctcaagttgcaagtgcagaaaaagatttgaagaaagcagaagcagctttagctaatgaacaaagtaaattggccgacgcaaaagctaaattagctgaattgaacaagaaagccaacaacaatactggtaagtcagattctaaacctgaaattaataatcaaaaacctgctaaaccagcaactaagccaggttcagaaagtgcaaatactgaaaagccagaacctgatttttcaggtaataacaaatcagattcaaagaaagaacaaaattctacagataatgtaaaatcagatgttaaatctgaaaacaagtcaaataagactaaggaagaatcaaaatcatcatcttctgtaaagattgttgataatggtgacgactcaactgcatctgttgttttagctggttctaataccgcagttaaagtctatggtgaaaagactgtaaacggcacgacttactacaagatcggagcaaatcactgggtaaaagctgataaagcacatgttgtttctatcggtggtcaagcaactactaagcaattgccacaaactggtgctaagaatgaactcattgcagcaatctcaggtttaacagttgcttcagttggtattgctagtgcaatgggcatgagccgtaagaaaaagaataactaatttataaaatttacatatttatacaaaaagagttgataaaccaatggcttaaagcttggttatcagctcttttttctatctttaaaatcacgtattaacagtaattattgtctagcaaaaccagttctaactgaataggcatctgaaaaaatccgagtcataatttgtaaaggtagtctagaacgtacttcatagtcagggaagtagttggttttagacatgtatcccataaaagttaatgtcgaaagcgaagcaagttgacccttgggattagtagtaaaagtaatagtagggacgtcatggtgagataggcttttagctgcatcaactagttcgggcgtattaccgtttaggctaataaaaataaccagagcatcttgtttaattcgcttagaagctgttttgataatgttaggatcagcatgaaattcgacatatttaccagttagttgaagtttgaccattatttcttgaccaatcgattcagataagcctcgcgcaaagatataaactacttttgcttgtttggtcatggagatactatcttcaatattactgtagctaagattatggagagtattgttcatctcaatttcatttttagtgattacgctcttaattttatcgtcggcctcatttaagacgtcaaagttgctgttagaacgatcttgtaacttcaaagattcccgataggaagtgtagccactgtagcccattttttgcattgttctaacaattgtggctgttgaaacatgggcaaactggctcagtttgacaatcgacatttttgcaattttttgcggattattttgaactatttcccataaatgtagttccgcattgctaagatcattattttgcatattagtacttccctttctgtaaaactttaccacttatttcgtaaaacgctttcaattcagaaaatccttacgttcttatctaagtatactaataatgtaagcggtaagaaaagggagaaaactcatgatttatacaataacacttaatccagcgatcgatttggtaatcattactaaaaaattagaagcaaatactgttaatcgaactgaaaattttgagcttcaacctaatggtaagggtgtaaatgtatcgtttattttgaaaaaaatgggtataaaaaatatggcgaccggaattggaggtggctttactcttgattacattacagcaggtttagaagaaaaaggcatcaagactaagtttcttaaggtgaaagaaccaactaggattaatgtctttacacgagttttagatcaaaatgtggaatataaagaagtaaatcctggtccagaagttggtccagaggttcaagataagttcttgaagtacttaaaagacaccctgaaagcagacgatactttaattatttcaggtagtttttcaaaaggaattaaagcagaatacttagttgaaattgcgaagattacagcagaaaaggatatcaaactagtaattgattctagttctaaagttgtgttagatacgctgcagtatcagccgtatttattaaaaccaaacgatcaagagctagctagtttctttgatctaaatgaaaaattagatcaggaaaagatcattgagttagctcgtaagttaattagcgctggctgtcagaatgtcttggtttcacttggcgagaatggagcggctttaattaataaagatcatgcttattttggtaatgcaccgaaaattcaggcacttaatacggctggcgctggtgatacaatgcttggaacctttattggagaaaagtcaaaggcaaaaagcgacactgcagctttaaaatctgcaatagcggctgctagcgatacagctagccgatccggattaacggattttaaattagaaaagtacctaaaggaaattcaagtaagtgaaattaagtagtaggaaggatgaaataaaatggctcaatatgatttagtcggggcaacgggctgcgctacgggagttgcccatacttttatggctgaagaagctttagaaaaagctgcccaaaagttaggttataagatcaaaattgaaacacatggtcaaactggtgttgaacatgagcttacgccagaagaaataaaagcggcgaaaggtgttgttattgcttctgatgttgatgttgatccagatcgttttgctggaaaaagagtagtaattgttccagttgccaaaggtatcaaagaacctgaaactttaattagagaggcattgagttcagaaacgccaatttataaaccaggacaaacggccaaaagttctactggaaaaagtagtgctggtgctgaaaaattaggcactaaaatttatacttcattaatgaatggtgtttcccacatgttgccatttgttgtggctggtggtgttttgattgctgtttcattcttctggggtatttattcagctgaccctaagagcagtcagtataatcaatttgcttatatgctaaatacaattggtagcacaaccatgggattgatggttccagttctaggtgcctttattgcagaagccttagctaaaagatcagggctagttgttggttttgcggccgggatgattactagcgttggtggtggcggcttcttaggtgcgatcattggtggttatttagctgccgttgtagtacttttactgcaaaaattaatgaagccattgccagacaaagaattccgaggattaaaatcaattttcttattgcctgtattaggggtatttatcactggtgcaatcatgttctggttgaatggaccaattaaggcaattaacacaggaatgatgtcttggctaaaaggttttgaaaattcaagtccaattcttttaggtattatcattggtgtaatgtgtgcctctgactttggtggaccaattaacaaagctgcttatgtaactggtactgcacttcttgctcaaggtaactattacttcatggcgggtgtatctgctgcatgtattgcaccgcctctagcaactggttttgcagttttattaaataagaaggcatattctaagaacgagcgtactgctggatatgttaacttcttgttaggatcaacccacattacagaaggtgcaattccatttgctgctaaacacccattatggaatattccagcatttatggtcggctcagcaattgccgcagctttgacttatgtttctagaattcaagttccagctcctcatggcggttttattattttgccactagttaataagccatttctatgggtattgtggattgtagttggtgcacttgtttccggagttttactagctttaattgctggtagatttgctaagacagaaccacaatttgaagatggtccagatattgatgtctttggtgaagaagaaaatgttaacaagccagtagctgaaaaagaaactactgattataatcttaaagatattttggatactcaaaatatcaaaattaatgttgatgttccagataaagattcagcgcttaagtatttagctaactttgctgtaaagaatggcttagctagtgatagcgaagaagtttatgataaatatttagctagagaaaaggaaagctctacagggatgactgatggttttgcaattccacatgcacaatctgctgctattaagcaatctgccatgcttgttttgaagttgaaaaatccgattgattggaattccttagatgggcaaaagattgatacggtgatttctttcttaattccagcaaaggatagtaagactcatttacagtacttatctaacacggctaaattgcttactcataaagactttattgaaaaattgaaagaagctaaaacgccagaagagattaagaagttatttgatggagaataagtaaaagctgatttttaataatagactaaaaattttaataatgatatcatctatataaccacttatgaattacaaggaggaattaattaatggcattattcaatgtacgtggcggtgctggtgatatcactaagccagatcttaacgcaagaccacaagataatctttacttagcagtgaactctgaatggattgaaaaagcaaagattccttcagaccgttcaagaattagctcatttgacggcattgacttgaatattgagaagagcttaatgcaagattttgctgattttgcagctggtaaaaagaaattgccagaagttcctaattttgacaaggcagttgagctttataggattgctaacaatttcgataaaagaaatgaagacggtgctaagccaattaaggctgatcttgaagaaattactagtttacgcaacttagctgatttgaacttaagagcagctgatttctataagaatgcttttgacttaccaattagcgtctcagttgatgcagatatgaaggatactaaggttcatgttgtttactttggtggacctggcttgttcttacctgacacaactacttatgacaatcctgcagctgctgacttattgaaagtattacaagatcaatctgaaaacttgttgaagatggctggcgtaagtgaagcagatgctaagaaatatgtcgaagatgcattgaagtttgataaaaagctttctaaagttcttaagtcaactgaagaatgggccgattatccagcaatgtacaatccaatatctttagctgaatttgaagcaaaatttgatagtttcaagattgataacttcttagctagtttatttgctaaaaaacctgaaaagattattgtaactgaaccgagattcttagatcacgttgaagaattgatcaacgaagataattttgatgaaattaagggctggatggttgttaagttcattaacggtgtagctgcatatctttcgcaagacttccgtaaagcggcctttccatttagtcaagctttatcaggtcagcctgaattatcttctggaactaagcaagcttaccatttagctaatggtatgttcagcgaagtagttggtgtatactacggccaaacttactttggtgcagaagctaaggctgatgttgaagatatgattcataaaatgattgatgtttatgaaaaacgtatctctgaaaatgattggctatctgaagatactaagaagaaggcaatcgttaagttacgtgccttaattttaaagattggttatccagaaaaaatcgaaaaaatttatgatcgtcttcaagtaacccctgaatcagaaggtggtagtctttactcaaacgaaagtgctgcttctgttgaatcaattaagtacaaccttgagaaattaactgaaccagttgatagaactgtttggttaatgccaggtaacttggtaaatgcatgttacgatccacaaagaaacgacatcactttcccagctgcaattttgcaaaagccattctatgatttgaagcaatcacgtagcttgaactatggtggtattggtgtggttattgctcatgaaatttcgcatgcctttgacaacaatggggctaagtttgatgaattcggtaacttgaagaactggtggactgacgaagatttcgctgaatttaagaagcgtacccaagctgaaattgacttgtttaacggcattgaatatggtccagtaaccttgaatggtaagcaaattgtttcagaaaacattgctgaccaaggtggcttgactgctgctgttgaagctaataagggtgaaaatggcaacatgaaggaagtctttgaaaacttcgctcgcgtttgggcaaacaagcaacttccagaatcaattaagacgcaagtttcagttgacgttcacgctcctggtcctgaaagagctaatgttcaatcacaatgccaagaagaattctacaaggcatttgatgtgaaaccagaagacggtatgtggcttgatccagaaaaacgtgttgtaatttggtaggaattaaataagaatcattaagaatcaaatggtaaaaagctgtttgattcttttttcatagtttgcaaaaaaatatcgttaataatattatgaattggtattcttattatctaagacaatcttcttaattagaaaaggttaaaaatgttagaaaaaataaaaactaataaattttgccaatttatctggccgtatctcttaattattttggccactacaattgttatctcgccgcaattaatttcgcatactatcctagctagcgatgatacggcagataccttgtttcactatagtcgtttctatgatgcaggaatgcagctaaaaactggaatttttagcatctttcaaactaattttaccttccagcagagcggtagaattattaatgcaatttatggaccgttatttgcatactttaatggaattttagttcttattgcgggtaattggtttaattatcaagtcattttagcctatgttatttcgctattaggtgctgggagtatgtattacttacttcaaaaagtaggtattaataaactactagctacagtaataggaattatttacattaacattgggatgattccagcctttattaaccgtagttcatttaacggttggggacaggcattaatgccgttagttgtgttatgcggcgtacgcatgattcaagataaagagaaaccaattaactggattcagctaatgttagtaatgagtttgctagtgcaagttcatgttttgagcactttaatggcagctcttttattaattcctttctttatctattccttaattattaattataattctaaaaaggtgtggatcccttttattaaggctgttgtcggaacaatagtattatcagctaatgtaattggggcttttttagttttaatgcctaataatcatttagctgcgaatactgaatttgatctgtctcgtggcgggttacgtccacatgtgctgtggcataacgaatatggcacagcttttgcctatattttgccaatttttgttttattaattattgcgcaatttgtttatgtcgtaatgcactacaaaaaagatagattaaatacttttgtaactatttggggtacggttttattaggactgtcttcatttgtttttccttggggattggttcaacgcatttttccaagcttgaagtcatacttccaatttccgtttagattaactgttgttgcctatccattaattttactagggatggcattaactattaatcagttactaaaacaaggagttaaaccaagagcagttggaattagtttagtggtagttcttcttttagaagctgctgtaccaaatatcattactaatcacatctttactgttgcttgtggaaaagatgcgcaagttcaaacagtagctaaagcatcaaacagtgatcagatgcttaagatgttgaaatggcactacttgcctgattatttaccaactaaagacaagtctattgaccaaaatgcagcttatctttacaaactaaatgtagttgatcaatatcaaaaatttaatcataaagttgctaaaaatggtgatttgattctttcttggaaaggaaaaaaggataaagatattgtcttgcccgttgttttatacaagcaaagtgaattaactgtgaacagtaagaaattcactggtgcaaaaaacgtaattggaaatccaattatttcgcaaaagtcaggtctcaatcgtgctgttttgcgttttattgctccagcttggttctatgtagtcagcgcaatttcgttaatagcatggctcagcgtacttgtattttacctgtggaaaaaatttattaataataacaacaacaaaataaaagttgcttaatcatatacaaaagtagtcttttaataagatagtctgagaccgtaaaatagtttgtgtaaggatgaattattccttaatttaatttcctaaaacattagaaaaaggagttcctttctcgtatgattggtttgaacaaaaaaaacatacagaaagaagaactccttcatgaatgattttaccaaaaatataactcaagctctattcaatcaagataaaattaatgatttgcttcgtcatgaaatccaacaagctgttaatgacatgttagaatctgaactgactgcctttttaggatatgatccctatgctagaaatggctggaatactggtaattctagaaatggtgcgtatttccgtaaaattgatacccagtttggatcaattgaggtacaagtgccacgagatcgcaatggtatgtttcatcaacacactctgccagactataaacaacatactgatctcttagaagatatggttataaagctttattctaaaggtgtaaccactagagaaatagctaatttgatcgaaaaaatgtatggcagtcattatagtccagctcaagtgtctaatatctctaagcaaatgattcctaaagttgaggcttatcacaagcgtaagctgagcgataagttcttttgtgtttatcttgatacaacgtatataccgttgcgtcgagaaacttttgaacgagaagcagtatatattgccattggcatcaagcctaatggtcacaaggaagttatcgactactgcattgcgcctagtgagaatattgaagtctggacggcgttgctccagaacatgaaatctcgtggtttaaagcaagtagagcttttcctttcagatggcgttgtcggcatgaaagcagcactggcaaagacctatcctcaagctcatttccaacgctgcttggtccatgttatgcgcaacatctgcgctaaagtacgcgtggacgatcgcgaggcaatcatgaacgaattcaagcagattcaccagcaagccaataaagcggctgctgttgatgtattgcatgctttttatgccaaatggaacaagagctacaatcgtgtcattagaaacctgaaagacatcgagccagacctgcttgttttttataattatcctaagcagatcagggcttcaatttactctaccaacatgatcgaatcctttaataacgtcattaagcgcaaggctaagcctaaagcggagttcccgactgaacagtcgcttgatacttttattggcatccaagcaatgagctacaatgaccgctacttcaaccgaattcacaaaggctttggtcaagtccaggataccttagaatcctattttgaataaataaaacgttaaaaaaacaatttacgagaaagatctatttacacaaaaaatttgacagtttcgatagtcttattaagaggctcctttttgtttgtatggttttacttactattaatatcaatttattttttgattattacatggctatagctgtcttgttatgttatgatttaattgtaatcattgaaaccgctttctatggtttcagaggaggaaaaataagttgagtacacaagaacgttattctcatgatgagttaagaaaagctaacaaaaaatttagtcgggttcgttctactattgaatctgccttttatggcaacaatgtacacgaagtaactagtgttgctgaagcttataatttagctaaaaaacaatctggtgttatcgaaactgacctacctattttgcatactaaggaactaggcttgccacaaggtgcaaagcaattagtttataaccacggtaaaattttgggtagaacagcaagtgcacgtcactttgttgatgatccaaaagaagatccagaggcattagcaggtaacttacgtgaagatatttataagggccatgatcaaaaattcttaaaggctacagttttagttggattagacccaacctttactgttaaggcacatattatgatgccagaggatcaagcctttaacttactttcatatattttgaacttccacttctttgatgaagaagcagagaaaatttacaagaattctaaagtatatgacgaaggagatatttacttctacttcgatccaaatactcaagatgaagattatcctaagggattcggcgtctttgacgcaccacataactgtgctgcagtcttcggcttacgctactttggagaattgaagaagggtactttaactcttgcttgggctatggctcacagaaatggttatactgcttgtcacggtggtgaaaagtcattccactttaaggacaaggacgataaggtatttgccttctatggcttatctggttcaggtaaatctactttgactcatgaaatgtacgatggtaaatatgacatcactgttttacatgatgacgcatttattgtttctcgtgaagatggttcttcagtagcattggagccttcatactttgataagactcacgattatccagcaggtcaccacgagactaagtactacactacaattatgaactgtgcagttactcaagatgaagatggtaagaaagttattgtaactgaagacttacgtaacaacaatggtcgtgttattaagactcgttacacttcaccacatagagttgactacgaagatgcaccaattactgctctattctggattatgaaggatggttcattaccaccaatcttaaaagttgatgatccagttttagcaacaacaatgggacttactttggctactaagagaactagtgctgaaaacttgccaaagggctttgacatgaatactttggtaattgaaccattcgcagatccattccgcgcatatccagtatctggcgattattcagacttcaaggaattattcactaagcgtggagcttcttgttacatcttgaatactgatgcctttatgggtaaggacattccaaaggaagtaactaagaagttagtcgaagatcttgctaacggcagtatcaaagatagtgactggaaaccatttggtaacttcaagggtgtatcttacttgccaattgaaggttatgaagttcatctagaagatcctgaataccaaaagaccttagctaatagaatgcaagaccgcttagactggttgaataagtacgatgaagaacatcctactcaaccaatccaagaagaagctaagaagactttggaaggtatcattaaagaattaaattagttaattgaaaaatcccctatcaatttctatattagaacattgaaaaagcgcatcccattgggatgcgctttttgtatatctatatctatttattactctttgagttcaccttcagcttgaagtttctttttgatatcttcaaatttctttggtgcgatacgagtaatatgttgtcttcgttgatttcctaagattaatggtacacgttcaataactgtatcagcataatctaagccaaaccaagaagctggattagaagaaagattttgaagccatacacgtgcttcaactaagaatttttcataacttctaagttgcgtttgtggactaattacatcattaacgataacgaatgaaaaatcaccaacatctctaccaggcgtagtagtgtattcttgcggttgcgattcaatcgtaccatcagcaattagatcatgcacgatttgacgcaagtatacattcacactcgtttgttgcttgaatcctaggaagagttgaacgttaattacattcttagttccgtaggtattaacagcatattcagcagtaaatggttcattagtaacatttactgttacgaaccagtatgctcgtgcgcgtttaggacgtttatctaagatagagtaaagaatttctcgcttaatgaatttattatatttaactttagccatgtaaactaggttagtagcaaaagtagggtaatcctcatcgtgacttaagtttgtcaacatatcaacatactcatcaagtcttacgtaagcattgcgtgattcgcgtttatctctgatcttattaccatagaaccatacgtacataataattccaataaaaccagcgataattaatgatacataaccaccatgtgtgaatttactcaagctggccaacataaacatgatgtctaagaatccaaagaagactaagaagatccagttccagatcgtacgaatgcccttcattgctagccattcataaagcagaattgttgtcattaacattgaaatagtaattgacaaaccataagctgcttccatgtgagcggaagtttggaagaaaagaacaattgcaattgttgcaatacagatcatcttattaacagaaggaatataaatctgtcccttcttagttgaaggatacataatgttcattcttggtaaaaatttcaatccactagcttcagctactagagtaaatgaacctgtgattaaagcttgcgaggcaataacggctgcaatagtagctaagacaatcgcaattaagcgaatattttgtgggatgatttcaaaaaatgggttaaaatcaccatttccagcattgtaattaggattatttaaaatccaaacaccttgaccaaagtaattaagtgataaacaaacaaagacatatggccaagaaccaataatatttcctttaccaacgtgaccaacgtcagaatataaggcttctgcaccagtagtagcaaggaagatggatcctaaaataaagattccagccttgttatatggactaaatagcagcttaattgcgtaatatgggttaagggcttgcaagatagataaatcacccatcatattcatcaagcccataactcctaaaaaggtaaaccagataaacatgattggtccaaaagctttaccaataatacttgtacccattcgctgaattgaaaacagaatcagcaaaatgactaccgtaatcgcaataacagttccctgtgtagaaactggaacattgccctgaccaaattcaattccttttaacccttcaatagctgttgtaacagtaacagcaggagttaatgtaccatcagctaaaattgcagctccaccaattaaagcaggaagcactaaccattttgctcgtttacgtactaaagtatagagagcaaaaataccaccttcaccatggttagtggcctttaatgcaataaagacagtctgcaaagttgttaataaggtaactgtccaaagtactagggaaatagatccgataatgaagtcacgatttacgtgagcgataccgccgtttccagcgacgattgacttcataacatataacggactggttccgatatcaccatagacaataccaatcgcaattaataatcccgcggctgatatatttttccgtgttttttcattcatatttattctcccaataaatagccgaaatgactaaatatctaaataacgtaaaaaaagaatgccaaaaaagggacattcttctttaaacatatctattttcatctatttatgcaagagttgcaagtatctatcggagaataattaaaaataattatcttagcttggttctgtgaatagatttcacatcttgcgaacctagaattaatggtacacgttcaatgactgtatcggcatattctaatccaaaccaaaccgcaggattagaggataagttttgaagccaaacccgactttcaaccagccatttttcgtaagaacttagttgagtttgaggactaattacgtcatttacaattacaaacttaaagtcaccaacatctctacctggagtagtggtgtattcttgtggttgcgattcaatcgtgccatctttgattaaatcgtggacaatttgacgtaagtaaacattaactttttgttgctgtttaaatcctaaatatagttgaacattaattacgttctttgtgccataggtattaactgcatattcagcagtaaaaggttcattcgttacatttacggttacaaaccaataagcatgagcacgcttagggcgtttatctaaaattgaatacagcatatcgcgcttaataaacttgttgtatttaacttttgccatgtagaccaagttggttgcatatagcggaatactttcgtcatggcttaaattgcttagcatagttgtaaattcatctaaacggacataagcattttcagcttcacgtttatcacgaattttattgccaaaataccaaatatacataattgccccaataaaggctgcaataattaccgtgacataaccaccatgtaagaatttagctaagctggaaatcaagaacatggtttcaattgcaccaaataaaagtaagaagactagtcgcaggctcaagttaacctttctaagtgataagtattcaaagagcaaaactgtcgtcatgagcatggttacggtaattgctaaaccataagctgcttccatgtgttcagaagttctgaataagaagacaattccgatggtagcagcgcaaagcatcttattaattgacggaataaaaagctgtccttgttcagtagaagggtaaataattttcattcttggtaaaaactttaaaccactagcttcagaaactaaggtgaaggaaccagtaattaaagcttgcgaggcaataattgcggctagggtagctagaattattgcaaagaacttccattgacttggcagagcttcaaagaatgggttaaagtctgtcgcaccagcatgataattaggattttctaagatccaaacgccttgaccgagataatttagggctaaacaaataaaaacgtaaggccaagagcccataatattacctttaccgacgtgtcccacatctgaataaagggcttctgcaccagtagtagctaagaatactgctcctagaattaaaacaccgactttattagctggactaaataaaatttttactgctaaaagtggattgagtgcttcaagtaaagaccagtcatgacttaagttcataattccagttagtcctaggaaagtaaaccagactagcatgattggtccaaaggtcttaccgataatgcttgttcccattctttggatagagaataggaaaagcaagatgacaatagtaatcataatgacactattttgatttggtactggaatatcgttaccaaatttcatgtttttaagaccttcaatagcagttgtaacagtaactgctggtgttaaagtaccatcagctagcaaagcagctcctccaactaaggcagggatgactagccatttagccttttttctaactaaagcataaagtgagaaaattccaccttcgccgtggttagttgctttaagggcaattaaaacatatttaacagttgttaaaagagtaatcgtccaaagaataagcgagatagaaccaacaatatattcgcggctaacatgagcgattccaccattttcgtttacgattgctttcataacataaagtggacttgtaccaatatcgccgtaaacaattccaatcgaaactaaaagccccgctaaggtgacttttttacgtaaattactattcataataagctttcctctaaaaagtattaaataacatttgaataaacaaaaaagaatgtattgtaataatacattctttttattttcgttagcactattttggccctttagaaaccaatatgcaaataataaattgtgatttttttatgaaagagtttgtttgatttcattacgacgatcagtgtaccatttatcccaatcttcataagtcttcatgttttgtgggtctacgccagtttgcttttgaatattgttaagcatatccataaagcgttctgcatgaatatttaatacgtgcttaaccaagttttgacggctgaaggccatattgttagttaagtaagtgttaatttcaataacatcatgattaccatcgtagacgtccataatttcaagatcactttcatcgaattttgaaatatagaagttagcaaatgtctttaagtaatcaggttgttctttaaattcagtagccggcatttctacacgatttgcctctggcataactacttcaaattcttctttttcttgagtttcttcggtgttcttcttgtcttcagtcaaagttaagagctcctttactgtctagctgtacaaaaattcaatataatcttacattgaattacaagcaaaagcaaattttgtcaggtttattgaaagttttctacatcttgcttagtgtatgaatcaattgtagtgtgaccgttattagcagctgatctcatgaagttaactactttttggtcagaccaagaactagtgtcaacaccaagtgaacttaattggttacgagtttgtgcgattactcgaccagtaactgtttgaccatcaatcatcatgccactatttgaatttgatgaagaattagtatttgaactattgttagcattgctatttgaagtggtggtatgggatgattgtttacttgccgcagagttgttttgagtgttagcggtatttgaattattttggctagagttagaactagtattggtattactattattagatgaattagattttgaactagtagatttgtgtgaagtagttgcttcatcgtcatcattagcatctaaattctcagtatcaatatcgtcgttaacatcttcaccgtttaatttagcattagcaactttacgtaaatgttttacatttttctttacttttttgtagtacttaccattaatgtaagacaagtctaaaatttggtcacaagattcaacggttgcttgataattaccatcacgatagcttaatttagcttgcttgtataaaggattgatatcgtgagtgatatggtcttgtaccttgttaatggtcttataaagcttagtagcttgcttagtcattacagaatagccattggtcttgttagctgccttgtctaattcacctaaagcatctttaaattcatactctctaatttcttcttgagcatctttcatagcgcctgcttggtctgcataggcttttgactcagaagttgctttcacatcgtgagcatcttcaaatttttcttcagctgcttcatacttttgactggaagcagcatcttttccttgactcatataagtgatgtacttgtctgagctgttattagatgaactgtttgatgatgaattagaacatccaactgcaaaaaaggtaataaagaatgccataatggcaactccgatttttgatcgtttcattgtttcttcctcctataaaaatgaatttatcttacttaaattataccaaatttcactagtaaaaaattggttgaaaaagttggcacaattctttgagataaatcgttagtaatagtgtaaggcaattcaccggtgatgacttacaaaacatatttagttactaattagattattagaggtagaaaaatggaatttattttaaaagatcaatcagttcaatttacttttgcaggtgaaaaatacagcaatggtaagaaaaacagaattttgaagaacgttaaaaagcaagctagtgctgaagaggtaatgaaagtcggaaatgccttgtctaaattgcaaaaagatgctggcatcaaaagcgctagattaatttcttattcagatattcaagcttaagaaataaaagaaaataatatatagaagatttttaaggagaattcaaaatgaccactactaagactttaagacttacatttaaaaatgctaaaaataagaaagtgaacttatcattacctgatgcagcagaaaatttaaccgaagaagaggttaaaactgccatgaatgaaatctgtgaagctaacttgtttgtcaaggaagaagttgatcaatatcaggctcctttatctgctcaatatgttgaacgtacagttacttctgtgtttgatgatagtgaaaagaactagaacaatattttatgagataaggatcttaattaagttattaaataaactcttgaaaggttaatgtttcggcattgccttttttattttgagacgaaagtatgtaatttatgttacttttttatttcagaatgtctgttcggttgtatctgacaacttgccacactacaataaagggtgtatgtaaattggagggagtttaagcaatgaaaaaaagaacattcactggtattgctaccgcggcacttatcacaactgccggtatatcagttaccaacaaccttaaaccagaaaatccattaaaaactggtgaaggtactgttcaagctgcaacatatcaacaagaatttttaaacaaagctattccagctgctacaactgcatcatctaagtatggtacttatacttcagttatgcttgctcaagcagctgttgaatcagcttggggtcaatcaggtttggcacaagcacctaataataacttatttggtattaaaggctcttacaagggtcaatcagtaaacatgaatactggcgagtatggcagcaatggttattacactactaacgctggatttagaaagtatccatcatatactgagtcatttgaagataatggctctttgttacgtaaccaaatgggtaactactactctggtacttgggtagaaaattcaaataattatgctcaagcaactcaaaatggtttacaaggtaagtatgcaactgcgccaaactatgctaagacacttaacagcgttatcgcagctaatggatttgataagtacgatcccgttacccaagttgttaacgaaaaccgtacagttgcacaaaccacaccaattatgagtgcaccagttgacgctagtgttggtactcaagttggtactgcaagaactggtcaaaatgtaaatgttactaagtacatcacttataacaatggtgttaagcgtgcatatattggtactggctggattaatgcacttgcatttagcccaattactactaatactactgcaaacaatgcagctactaacaaacaagttagtcaaacagttaaaacgccagtagcccaaactcaacaagctaagagtcaagcacctgcagctccagttaaaactgcaactgtaacggtaaaagcaaagagtgcagctgaagttaaaactccagtccaaaccaacactttaaacgttaagactgaaaataaagtagcacaacctgtaaaacaattagctacttcattagctgtagctccagctaagaaagaagttaagaaggaagttattaaagctgaaccagctaagacaactcctgtaaaggctgcgtctactaaagttgaaactaaacaaattaaacctgcaactccagcagttaaaactactgatacagttaaaaaggttgaaactccaacagttaaaccagttgagtctgtaaagaaggaatcaactccagttgttaagactgctccagttactgtaactaaagaagctgccaagaccactgaagctccagtagttaaacctaagaaagttgaagttaaggaagttaagacaactccagtaactactagtgctaaaactgttgtcaagcctgttcaaagctaccaaaatgttgttgcaaacaataactatggtactcaatggatcagtactaatactgctcctaaggctgcatctactgttttagttaaggttactaagactgttgacgttttatcaacaccagatggtcaaaagttaaatcaacaagttgaagctggctcagagttcgttgttattgcttctaaatactacaacggtaacttatattacgaaattagcaacggtaaatggattatggcaaaatatactactcaagaagcacaaattactgcaaaatctggtgtattaactattaattctaagccagattacggtgtgccagtatggcgtgtgccaggtcaagatcaagtttcaggtaaattcttgaaagatggctcaagttggagatacttccgtgtagctaatgttcatggacaaacttggtatgaccttggcggaaatcaatgggtatctgccaagtctgtattagttcgttaatgtataattgggatagaatttaattcattaaaattttttggaggagaagtttttaatgcgttcaacaaataaaagatttattagtgccttagcttgtgctagtgctatgacagctttagcaattgccgatccaatgggtgttactaagactcatcaagtagtacaagctgcaactgataatgtacctgcaagatctgcaggtgtggatgttgcaagctggcaaggtactaatttgactcaacaagctaagtcaggtgctaaatttactgtagttaaagtatctgaaagtacaaactaccaaaaccctcatgctcaaggtcaaattaatagtgctgaacaaaacaatatgatgccaatgggttaccactatgctcactttggtgcagatagcaacagagctgttcaagaaggtaactatgctgttagttcagctcaacaagctggtttaccacaaggttcatatttagcagctgactgggaacaagatgctcataacaacactaatggtggtcgtgaagcaagtgctaatgcaattactagctttatggatactgttcacaatggtggttataacccaatgctttattcaagtgaatggttattaaaggctaaggttgatactaataaggttactcaaaagtatccaaattcattgtgggtagcagcttataaaactatgggccgtcaagatcaacctgattataactacttcccatcaatgagtaatgttgctatttggcagtatactccaaactggcgtggtcaaaacgttgacggaaatgttaatgtacttcctctttcaaataagagtaacaacgctaaccaagctaataccaacactttaaacgttaatactaatggtcaaagcagtagtcaagcacctgcaaatccagttgttaacacttctaataaggtagttgatactaattgggttaagcaagaaggtactttcactaccggtggcgcaattaacttgagaactggtgcaagtactaatagtagtatcattgctcaacttccagcaaacagtgaagtaaagtatgatgcttatagtactaagggtaactatacatggttgagacaaccacgtgctaacaaccaatatggttacttagtaggacgtgcaaatggacaagattggggtacttttaaaattgctccagttgctaaccatgtaacaaaaccaacaactaacacagctaagccagctcaaaatgttaacaagccaagtcaaccagtacacgtaaatacaaataataatgtaaacaataactggactaagcaaaatggtgtatttatcactggtggagcaattaacttgagaactggtgccagcaccaatagtaaggtaattgcattattgccaacaaacactgaaattaagtacgatgcttaccgtactacaggccaatacacttggttaagacaaccacgtgccaatggtcaatacggttacttagtgggacgtgataatggtcgcgcatggggaacttttaaagcaggttctgctgcagcaagtaagccagctcaaaacactaacaagccaagtcaaccagtacatactaatacaaacaacaatgtaaatagtaactggactaagcaaaatggtgtatttatcaccggtggcgcaattaacttgagaactggtgctaacaccaacagtgaagtaattgccttactcccaacaaacactgaaatcaagtacgatgcctaccgcactactggtcaatacggttacttagtaggacgtaataatggcaatgcatggggtacgttcaaagccggttctgcagtttcaactaaaccagcaacaaataataagcctgcacaaaatactcataacaataagccagcaactaataacagtaactggactaagcaaaatggtgtatttatcaccggtggcgcaattaacttgagaactggtgcaagcactaacagcaaggtaattgccttacttccaacaaacactgaaattaagtatgatgcctaccgcactacaggccaatacacatggttgagacaaccacgtgctaacggtcaatacggttacttagtaggacgtaataacggtaatgcatggggaacatttaaagtaggttctgctaaagctactactcctgttgttcaccaaaatgtgcaaaagccagtagctacaacaactaataataatgctacttggactaagcaaaacggtactttcattaccggtggcgcaatcaacttaagaaccggtgcaagtactaagagtccaattattgagactttaccaattaacaccgtaattaagtatgatgcttactaccgtgccggtaagtatgtatggttaagacaaccacgtgccaatggtcaatatggctacttagtaggtcgcttaaacaaccaagcatggggaacttacagatagtttaaaaaaatgaataatctgaaaagacatgatccgaataggaatcatgtcttttttgtcttataataaattatgaaaaaagtatggaggacatagttttgatttatacagtaactttagatcctagcgaaagtgtagtaggtaaaggaattaatatttcacttgttttaaagaaattaggtattgaatcgattgcaactggtattgtaaatcataaaaacgtagagcaagttgcagaagaacttgataaagcagagattgaaaatcaatttattgaacaaaaacgtggaattaaaatcactgctaaaaatcagcaaaagttattagattatctgaaagtcttaaaagccggtgacattctagttattgctggtggttttgccaagggaattgatccagtttatttaactgatcttgctaaagtagctgataaaaaggcagcaggcttggtagtggatgttccttatgaaaacgttcttgatatcttgccaatgaatcctttattgattaagccgaatgaaacggaattaaaacattggtttgaaaaagataatcaaaaggtaactacgaaagaattaattaatatggctcatgatttagtagttaagggtgcgcagcatgttcttttgtctttaggcgcaaacggcgctgcaattgttaatatgatggacgctctaatggcacatgcaccagaaattgaagaagtagttgatagtacgggtagtggagatgcgcttcttggtactttccttgcagggatgctaaagggctatatgccggttaaaaatttgtcagatgcaattgcagcagggagcgatacagctcaaagcgattggcttactgactttagaactacaccagcacttcaaaagcaagtcattgcaagacgtattacttttgaagaagcagaataaagaaaataagttggcttgttagagccgacttattttttgatgctttttttagtataatgacaataattttataataagggagaaaaaacgtggacttatctctatttattgttagtctagctgccctagttattccgattattatggcacggtttaagatcaatgctattccaactgccgttgctgaaattgtaactggaataattttaggtaagagcttattaaatacaattaaaattaccagtagtgtatcacttctatcgaatttaggtgtgatattactgatgtttctttcaggaatggaaatcaattttgatttatttaagaaaaaagatttgcctgatactaagccaagtagtgttaacccagcgcgtatagcagttttttcctttgccacgataacagttatggcgcttattttagctgagatattaaaattaattggactctttagcgatgtaatgctggcaatgatcatcttcatgactgtagccttaggagtggttattgcaaccttaaaagaaaaagaaatcttatctcgtccaattggacagacaattttactaacagcagttttaggagaagtaataccactactacttttaactgtctatgcttcaattaatggtggtaatgcaggaaaactatggttgatcattttattattcctcgtagcgattgttttactgaaaagatttaagcagccgtatcaatggtttaacagaatatctaaatctactacgcaattagatattagactagcctttttcttgattttcactttagtaacggttgctgaacgagtaggtgctgaaaacattcttggagctttcttagccggaatggttatgaaattacttgagccaagtgaagcaactatggacaaattaacttctattggttatggattttttattccaattttctttattacaactggtgttaagctagatcttaagactttaattactaatccgaatgccttaatgttaattccggttttggttttatttctacttttgtcaaagctaccaatctttttagtctatgttcgtagctttaataagcgcaatagtattgcaagaacgtttttaattatgactacgattacgattgtgcttccaactttggaagttgctcgtaaactgaatgcaattacagaaactcaatcagatgcctttattttagcagctgttgtggtatgtattttaggaccgattttgtttaattcaatttttaagttgactaaagaagataagattaaacaaagagttgtcatcatgggaacaaatatgatgactgtaccggttgcacaagaattgcatgataactggtatgatgttcttttagtaactcataagaaagaaaattacgatacttataagagtaaagttgctaatttaaaattaatttcaagtcttgaagaaacatgcttagaaaaagccggtgcctttaattgtgatattttggtagctggatttattgaagatgaattgaatcgtaaaattgcccggatggctaaagagcatggcgttcaaagagtaattgcaagtcaagagcgaccaaaaccagagacgattaagaacttaacaaatgaaaagattgagatctacaatctctttaatgttcaaacttcagttttacgtgctttgattgaatcgccatctattttaagaattctaactgatactaagaatggtctttttgaagttacagttagaaatcataaatacgctggtcaaaagttgatgaatcttgactttattgaacaaatgacagtaagtcgaatttggagaaatggtacttggttagtaccgcatggtaacacgattattgaaactggtgatcatttgatctttacggctaaaggcgaagatgcagaaagagtacgagaagaattaggaagaaaaaattagcaagaaaaaggacaggattttaattcctgtcctttttgttaacgttgacttttagcttcttgtaaaacagctaaggtatttaaactatgggtaaaagcttgatcagcttctttgaaatcatgttgagcaatgattttagtaaattcaatgaattcagccaccattcggtgagagtacttattgttgttgataactttaacttcttgtccttttaattgcattccaactttaggcatttcattagggtgaccataaattatcaatgcgcctttttcaccttcaatggtgctgacattcggtgaaaaactatctttagcagcgattgaactagcttgtttatcaggataacttaggtgcaagatgcctgaagtgtcgatatttttctgcattgtagggaagtaattgacagcttctggcttgccaaatagtttgataataatgtgcaaattgtaaattcctagatccatcaaagcaccaccgtcttttttcggatcaaaagctggctgaatatcaccagctaggaaggcatcatagcgactagaatactgagtgtagttaaggttaactacatgaattggagcaattttatctaaattttcttcaataaacttaaagttttccaaataaatgttagttatggcttcaataatgatgagcttcttctgatcagcaattgcttttaattctcttgcttcatcaacagttgcgacaaaaggcttttcgcaaataacatttttacctgcttcaagtgcagcttttgaaatagaaaagtgaaaactatttggtactgctacataaacagtatcaacgttaggatcattaaataagtcatcattattatcgtataatttagtgatctgatattctttttgtaaatctaggccaatttgatgacttctcttagtagttgcaagagctgtaagttcgagattgggaatttgatcagcaattgttagaaaatcatggacaatttttccagaaccaataatacctaatttcataagtttctcctttaatttgatttaatatttagttttttggcatttttagtaaccgaggttggaatctttaatttcttaacctggttaacatcatataagtgaagtgataaggtgccttcttttttactatagtaagtaactttatagtaaagatcggttagctcttttttgcggttaactttaactcgcagctcaatgctttttacattacttgactgcgggtcacttgtagaagctactgaagtagctttttgcatgcttttaatgacgtctttatcattgccatggtaagaaattacatagccactaaagccattagattttagttttaactttttaaaagcatcatcagagaattgtttaaagttgtgagctgtatagagctttttgtagccagagtaaacctcattgaagatcgcattttgcttaatataattccatgcttcatcattatcacgatgatagacgtattgatcattagaccagagttcagaatttgtatctgattttgggatacttctcattgtgatgtgaattgtgttattaggaccaacgacatagtttgagtacattttgccttttgaattggtagttttaacatcgacacgtgctgtttgaatttcagtatctgctgctttagttaaggcagctttaggactaggcttgccaagggcgaaagtagcgcccaaaataattactactaaaataataatggctaaaattaaagcggcaattttgccgccttgattgttaggaaaaataatctttttattttttgctttatttttctgcattagtttatctttctaaaatgattattgtttgttttgctcagcttgagctttcttgatctcttcagcgtcaatcgcattcttctgaatatcagcaggaactgctaagtcagcgtgctggccgagttgatcataagttaaggtccaagtgaagttatattttccaccagcaatgtattgtgccttgaaagtcatagattcaacattttttgttgtaggatcaattaaataagtaacttttaagttctgcacttgggctgatttaactagacgagctacttgcatgttttgtgaacctggagtattcatagcgtcaataacaagtggattgaccgcattccatagattagaatcagtcccattgaaactgatgtcatagttgccatttttcttttgaacagtagcctttttagcaagtgctttgttgatcttcttaaaagttgcaggattaaatctttcttttacttggtcgggatcaaaagtatcggcattagctgagtttttgatccagtgtcccttattttgctctaaaagaaggtacatatattttttagttaaccacatttgttctgtttgtgattttttcttttgagtcaaagtgtaagtaagattagttacatcgcctttatctttaaaaagaccttccgattttgacttttggctcatttcatcagaattaattgtttgagtgaagtgaccgttagctaagctagaattaaacttagcattaattagcgaacttgcagaaggttcaggattagtttttggtttactatctttctttgaacaagctgtagttaaagaaactaaaattactcccaataagagcaggaagttgaattttttcttcataaaaatattcccccaataaatgtatctatcgtatcctattttactctattttctgttgaaaaaagtattataagaacttaactttagtgctttttaaggacatttaagatattgcgcaatttgctgcccttaacttgcaaatttttaactgcttgcgttacttcaatacaaccaatatattttccatcttcgttatgaaggctataaaaagaaatatttattggttgctcatctttagtgatcataattgaaatatttttacgattgcctgcgtgcatttggtttaaaacttctttaacgtgtttttggctgtggccgggatgcacctcaaaaacagtcttaccaatatctttttcggttcgcttgaagaggcgattcttattcattgatgaccagacaacgcgatcattttcatctaagacgtccatttcttgtggaatagttctaaagattgcatttaactgttcaagtgagagatgaccaccgtctaaattaatattatccataggtaattcttccaatctgtccaaattaatatatctattgttattttaacattaaaaaattgtggattaataaagctttttttcgtaattcctatgaaaatttctcataagcgtgtaaaatagttagtgaaacattgaattttaaaggagatacagttcatgtcgaaattagttttaattcgtcacggtcaaagtgaatggaacctttctaaccaatttactggttgggttgatgtaaacctttcagaaaaaggtgttgaagaagctaagaaggctggtcgtttaattaaggaacacggtcttgaatttgatcaagcttacacttcattattaactcgtgctatcaagactttgcactacgcacttgaagaaagtgaccaactttggattccagaaactaagacttggagattaaatgaacgtcattacggtgctcttcaaggtttaaacaagaaggctactgctgaaaaatacggtgacgaacaagttcacatttggcgtcgttcatacgatgttttgccaccagctattgatgatgacaacgaatttagtcaagcacatgaccgtcgttacgcaaacttggatccacacatcgttcctaaggcagaaaacttacacgtatgtcttgatcgtgtaatgccattctgggaagatcacattgctccagatttacttgacggcaagaacgttattattgctgcacatggtaactcacttcgtgctttaactaagtacattgaaaacatctcagatgatgacatcatgaacttagaaatgaagactggtgaaccagttgtttacacatttgacgacaagttagatgttgttaacaaagaaaagcttgacgactaatttttagttattgagtattaaagctctgacgaaagtcagagctttttttgtaaatcaaaaaacctcctaaacaggaggcttttaagtatgactattatgtttgtgtatttaagttttgctttaaataagagctagtcttataatttttaccaactagctttacgcacgccaggaagttgtcctttatgtgctagttccttgaagcgtaaacgtgacataccaaacttacgcatataaccatgtggtctaccatcgtgtagatcacggttgtggtagtgagttgggtgagcatcaagtggcagttttgctagtgcttcgatgtcaccagcttcttttaattcgtagtattttttgattaattcgcgctgcttagcagccttaacaattttggatttttttgccatatatctttcctttcgaatatagaatttgaatgtgataaagattaactataataatttgagctaacttaaagtaagcatattgtattaaattattaataatttgtcaaaaagaaagtattttaaaaagaattagtttaaaataagtaatgattgattaaagaagggaaaagaagccgtgggtatttttaaaagaatacttcataatgaagacttgcgacagctgattatttatgtattaattggtgtgttaggattaggtgttgattttggaattttcgcactccttacccattttaagatgcaagtcgaagtagctaattttatttcatcatcttgtgggttaatcaataacttcttctggaatagttttcttaactttaaggttcacgataagttattaataagattcgtttcttactatttagttggacaaattacgactttatttaccacattatgtttatttattttcgtaactcagctaggctataaccaactaattgttaaggccgtttcaacatttatcgctaccttaattcaatttgtaattaataaattacttacatttagaaaaataaaaactactaagtcaaaagtagacattagaaagtaatcagaaagcctgttaaagtatgaaaaaattatcaattattgttccttgttacaatgaagaggaatctgtaccacttttttatccagctgtgaataaagtaatggatacaattccagatttagagccagaatattggtttattaatgatggttccaaagataatacacttaaagaaattaaagaattacgcaaaaaagatccagaacatgttcactttgtttctttttcaagaaactttggtaaggagtccgcactttatgccggacttcaagctgcaactggagactatgtagtcgtaatggatgttgacttacaagatccacctaagtttttgccgcaaatgtatgatttgatcaagacgggagaatatgactgtattggaactcgtcgggttgaccgtacaggggaagctaagtttaagtctttcctaagtgatatgttctataaggttgttaataagatttctgatactgaaattgtaccaggcgcccgtgactaccgaatgatgactcgtcagatggtaaatgcagttttggatatgcctgaatacaaccgtttttcaaaaggaatcttctcttgggttggatttaagactaagtatttagactaccacaatgttgaacgtgtagctggcgaaagtgattggaacacttggaaattattcaaatacgcgatggacggaattgcggacttttcacaagcgccacttaacttagccgtttggattggtactggctcatttgtattatcaattattggcttgatcattgtaattattcgcagagcactctaccctggttcaagcatctttggctgggcttcaatggtatgcattattttgctactgggtggtctgcaactactctgcattggtattttgggtaaatacattggtagggtatatattcaagttaagaatcgaccgatttatattattaaagagaaaaaataaacattgcaaaaagtttcggaattatcacataaattccgaaactttttttatgagattataaatttgaaaagtgagataatcttagcgagggagaattttagaatgaaaaaaattagtcaaaatacatggataaaaattgctttatctattctgggagttttggctgcaattttggtttatgtacctaactatgcagcagttgatcaggggcttaagggtagatgtgcaattttctttattattgcagtggtcttgctttggctaccaatggagttaaaaagcagtatttttgcgcttaatttctattatgaattaggattaattttaattattgtctttttgatgactaatcaaatggcaatgaatttcactattggtctagttattgctttactattattaacctgggtcgggatggtaatttttaaaaataatctcgtaatgaaacaaaagaatagcgaattgttaattattagattagtgatgatgctagttttagcatatttggcttatattagtggctttgcggcactaatgggtgctgaaatttttactgtacaaggccaaacttggctacttattttaggttttgtactttgtgtctactatcttgttttagcagggagtatttggcagccctggtttagaaggtggacttcttggatcatgattttagcggcagttgtactgcacatgatctttgcaagtgcaacttcattaaatgttatctttttgccaataattggtgaaataattatgctaattttggtctggcgtagcaatcggatcttaatgaaaaagaaaatgatttcataattgactcttgccagacggtattaatccctgatagaagaaattgtttaaaagtttagggagagatacaaaattatgaaatatgtttatttgtttttaccagcaattggctggggactgatgcccttagttattgctagtgtgaaaaatagtacagtttataatcaaattgtgggtacagttgcggcttcatttatttttggtgcagttgtaatggcaattatgcatccagcaatgagttggtcactatttttgctttctgcattaggtggtgcttgctgggtaattggtcaagttggtcaatatatttcttatgaaaaaattggtgtttcagaaacaatgccaatttcaactggtttgcagttgatcggtgtgcctcttgtaggtgtgcttgcttttggcgaatgggctagtccacaagctaagctttatggctttattggtattttagtattaattattggagttgttttaacttcattgactgatcggggaacaagcgaaggcaacaagtctaatcagataagcacaattattttgcttgtgttaacttcacttggctacattacttcaagttcaattccaaaggctttacatggaagtagtatttcaatcttctttggtcaaaccttcggtatgcttgtagctgtgtttatctatacgcttgttactaaaaatttacatgtttggaaagaaaaatctactgttcaaagtggtggagcaggtattctatatgcaattgctgcattagcttacattctttctgttcaagataacggagttaacatggcttttgttatttcacaactttgcgtagttatctctactttaggtggcttagttttcttacacgaaaagaaaactcgcaacggtttaatttttaccattgcaggcctagtattaattattggcggtgcaatgttaactacattattctaggtatgaaagaaggcatcccattgggatgccttctttgtatcaacttgtcctaattcttaaatcatttttagtattagaacacctttcattgtattagaactaaattaaaagtcaagctaaatacaacagtgtttaacttattataacatttaagaattaataacaagtgtagagatacggaattcagtaataatctatatgttatcgcttgcagttgacatattgagtatggcgtgatattttcagaataggatcagtcgaaattgtttaggaggacaattgatggtaacaattgaaaacaaccagttaaaggttgaaattaatgaagtcggcgcccagcttactcatgtagttgataaggctactaatgccgactacatttggaatgggagtgaatgggagagacatgctccaattctttttccagcgatcggaagatcaaatgataataaatatattttaaatggaaaaacatatgaaatgaaacaacacggctttgctcgtgactatccatggacagttgtcgataagggagacgaccgagtaagtttaactctaaccgaaaatgatgaaactttagctgtttatccatttcgttttagcttgatggctacatatacattagaagctaatcaattaaaagtagaatttttagttaaaaacaattcaaaagaaacaatgccttttggattaggattccaccctgggttcaatgtcccagtagctggcgatgagctagaattttctgactatgaaattaatttaagcccagaagtaacagaattgactcaatttcaaattgatccaattccatttagaaatggtaaagttattcctgtacctaatgcacaaaagagtactttaccattgtcatatgctgaatttgatgatgggctgatcattattaataatcctggcttaactggaattgaactatctagtgcgaagtctgaccacaagatttctttaactttagaagattttccatatgtggcactctgggctatgacagatccagaagctaagtttttatgtatggaaccttttgctggcttaccagacattaagagcaatgaattaactgactggatggaaaaagaaggtaataacttcctggcaccagatgaaagttcacatttttcaactacaattactttagaataaatatgaaaagagggaagcgagagatgtttctctcttttttactaattgattaagatttggcataataaagttttcagattgtaattttgctataatatccttgttttaagaaagtttgagaaagaatattatggataataagcccaaagaacctgttctctcaagagttgagctgaacaaagaaaaacatagtaagaaaaagccaatccgtattatcattgcggtagttttagtgttggttttaggacttggtgcctacgcaggatctgtctattttaaagctaagaatgcttttgataaaacctatgatcctaagaatgccgtaaagcaagatagtttttctggcaaagagccatttaatattttgttattagggacagatacaggcgcttttggtagaaaagaagttcgtggaaattcggatacgatgattatagtaaccgttaatccagctaaaaagaaactttctttgatgtcgattccgcgtgatacgatggcaagaatgatcgggacagagagctttagcgtccacaagattaatgcagcttataacattggtggagctaagatggcgatgcagactactagtaaagtccttaatgttccgataaagtattatatttcaatgaatatgggtggtatgcgtaagattgttgacggcgttggcggtgttactgtgacgcctcctcttacctttacctatgatggctatacttttactaaaggtaaaaaagttcacttaaatggtagtcaagctttggcttattcaaggatgcgctacgatgatcccaagggagactatggtaggcagctacgtcaacgtgaagttattatgtcagttttagagcatgctatgtcatttagcactttaaagaacttagattcaattttaggctcagtttctactagtttaaggactaatttaacttttgattcaatggtgaagattagtaagaactatcgtaaatgtacccaaaacatgtctagcgactacttgcacggagtaggagcaatgattggggatgcatcatatcaagtaatgtctgacaaagaattacaacgaacttctaatattgtgagaaatgatctgggtctagattcaatgaatattgataataatgaaacttatcaaaattcaatgaattctcaatttgattggaccagtggtgattctaatcaggtatactacgtatatgatccttatacggatgaattatggaacggagatcgtgcttattaatgaatgaattgattttactagtaataggatatttcctcggaaatatcctttttgctatgattgtcgcaaaaatatttttacataaagatccaactaagtatggttcaggtaatcctggcacagctaatattggcgcagtttttggtaaaaagtggggtattctcacttgtatcggagatttagctaagactttggcagcgttgttaattgtttactctctttatcatggtaatcgtttagatttgtcttttgccggtcttggcgtagtcttagggcattcatttccgttctggaatcacttcaagggtggtaaaggagtggcagttactgcattatggcttgtctttttcgattggcgagctggcttaattgctttattgtttggcttgtttttagtgattattatgaaaaatcttacaattccgccacttgtctatatgttgggtttcagtatttttacttggcttaactttggttgggaacaaggattaatctttttaattgctactttaattatgatttttcaatttagaaaagacattgttgacttctttaccggacacggtaagcgagtggatgttttggtaacaattaagaaaaagttagggatatacaaatgaaatcagcgttaagaaaaacaatccagtggatcttacttttatgtttattgctgggaatattaattcaaaccttaggcttttggaactataatccaacttcagtttctactaaaacgcgaattggcatggtaatcagtctgattcaattgatagtggttgtctggtatgggatgagctacggcagtaaggagtatagctttaaagaggtagttaagaactggcttgaaggtgtcattactctgattattttctatttagtatttgttatttcattgccgcaattgttctccgcctggaacttatggggagtctttttcccagttttaacaagtacgtcagctttatttagcggaattattatctctttattctttcagccttttatttttcgactacaagaaagattaaatactaagcaaaatgtgttgttattaactaccattacacttttaatttttactttaagtgctggaaattcgcttttaactagctatagtatttttggcttgtacttagttttgccttttgcctggggaatgttgatttctaaaattaaggtatctaagaaagtactttttggcctggtagtagcaacgattattttgctaccagcagtttactatcttacgattaaattaatgccgattcagacgccacaaggatttatcttttctcagatgaatatgtcttggaatactagtcttttaatggccccatcatcaccgttgatgattttatttgtggttactggagcattattatttagaagttcaatgctaggagcatctcacagagtattttcaattttaattccagcaattatttttgggactacctcttatgggatgagcttgtggaaggaaaagctgcaattgttgcttgcacccgtaagtaagaaagttactgtcttattgattctttctttattagttgcaagctttattattaattttattttcgttaattttattctgtcaaataagtgcgttcagagattcttaaataagtttgatgagaataatctggatggtcttgttaaacttttagaagcgggattgggctttttaaagaaacatagcagatcaattatcttatttgcattcctgatattcttaagtatcgtcggtttttatactgttcgagatattcaatctgcaagtgatttttgggttgctttagtctttatttttactagcaaatttggcactttagttttatcgtcgatcttcttatttgcaatttatgagatcttttatgtaattactactaggttctgggtatccgcaagcattccaactgttttggctttaggaattgcaattgcagatggaatcaagatggatttaagagaagagccagtttatcccaatgaaattagtgagatcgttaattggaagacactaattccaatgattggtgtgcaaaccttaatttatattttagtgggcattgcactcttagttgctgttattgtctatcttgaattaaagcacccatataacttaaagagagagaaaaagagctgggttgctttaattggaagtctcttaatcttaattacaccggtgtggtttaatgatgaagattcagtgatttactatatttcaaaaggctttgataataaccctgattttagaaatccaccagatagtacagctaataacggtgcagttttaacgtttttagactttattaaagttccaattatggataagccagctggttattcagaacatgcgattaaagaaatcactaagaagtatcaaaaagaagcaattgctattaacaagacaaggaaaaataagttgtcggatcaaacaattgtctttaatttgagtgaaagctttgtagatccaaaagaatttccaggtgttaaagtttctaacaatgttagagatccgatggagtatatccgtagcttaatgactcaaacgacctctggtaaaatgcttagtgctggatatggtggcggaactggaaatatggaatatgagtctttaactggctttaatatgggtaacttttctagtgccttaacgccatatactcaagtaacttcgcactatgaattctacccaacaattgggatgaatttcccttatagtagtgcaatccatccatttaagggtacgtattacggccgaattgataattaccgccggtttaagttcaataagtttgcttatttgggttctaaatataagatctatgatcaaaagtcacttggtaccagtccatatctttctgatgaaacagcctatcaaaatggtttaagacagatcaagagtagaaaaggcggtcaatttattaaccttatctcaatgcaaaaccatatgccctatggcgattattattcaccaaatgaatataaggataatgtcagtggctcttctcttgcagatgataacgttaaaactagttttgcggcatatacgaagggggttgaatatactgataaggcagttaaggaatttattgcacaaattgataagcttaataaacctgtcacgctagtcttttatggggaccactacccatcaattattgatcaatcgcttttagctaaatatcctttaaagatgcattcaactacttactttatctattcaaataagtatgcgcgtgaacatggggctaagagtaaaatcgtgccagataagtacgttgcaactagttcctttattccgatggctttagagcaaactaatgctaaagttactgcctatcaagctttacttactcggatctacaaagatcttcctgcaatgacaattaactatagtagtagtgacggttttgaactagttgatcaaaatggtaagaaagtttctgaaaagaaattaactaaaaagcaaaaagaattattgaaagactacaaactgattcaatatgatatgtcagctggtaagggttacactttagatgttaaaggcttttataaataagcagttgactaaatagctattctcccttattatcataggtaaatataaagtagcaacttgattcagtgttcagagaactagcggttagtgtgagctaggcaggtcaaacttgcgaagtacaataatggggttgtttccttatcaactgtctcaaggcgcattaagcgtgaacgtgggtggtaccacggctaatgaagtaatttagtcgtccctagatttcgaaagaagtctagggacgttttttgttaggagaaattattatggcaaaatttgacattttagaagatttaaaatggcgcggtgctattaaccaagaaaccgatgaagaagggttacgtaagtacttagcagagcatgatgatttagctctttactgcggaactgatccaactggagattctcttcatattggacacttaattccatttatgattttaaaaagattccaaatggctggctaccatccagtaattttgattggtggaggaactggttcaattggtgacccatcaggtagaaagaccgaacgtgttcttcaaactgctgaacaagttaagcacaatgaagaaaaattgactactcaaatgaagaagttattcggtactgaaaactttgaaattaaaaacaatgctgaatggcttggaaaacttaatttgatcgatttcctacgtgactatggtaaatttttccaagttaataacatgattaacaaggatgttgttgcaagccgtttagagaacggtatttcatttactgaattcagttaccaaattttgcaagcaattgatttctaccatttgaacaaagataacggtgttcaacttcaaattggtggttctgatcaatggggcaatattactgctggtatcgatttaatccacaagcttgaaggtcaagagcgtccagcatttggtttaactattccattgatgcttaaggccgatgggactaagtttggtaaatctgctggtggtgctgtttggcttgatcctgaaaagaccagtccttacgaattctaccaattctggattaaccaagatgatcgggacgttgttaagtaccttaaatactttactttcttatctcgtgaagaaattgaagacttggctgaaaagactgaaaaagaaccttggaagcgagcagctcaaaagagattagctgaagaagtaactaagtttgttcatggtgaagaaggcttgaaagaagctcaaatgattactgaagcattattctcaggtaacgttaagagcttgtctgtacctcaaattgaacaagctttgaagaatgcaccgagtgctgaagcaactcatgaagctaagaatattgttgaattcttggttgaaactaagattgaaccatctaagcgtcaagcacgtgaagatgttaagaacggtgctatttacgtaaatggtgaacgtcaaaatgatattgacttcattattgaacctgataatgattttgatggtaagtacgtaattatccgtaagggtaagagagagtacactctagttaaaattaaatagttagtgaaaaaagaagacgagggatcgctagaaagcattcctcgtcttttttgttataattaggtgtagattaaatgtgtttgccgttttagctcaggaggtagagcaccgccgtggtaaggaggaggtccccagttcaaatctgggaaacggcttagttattaaataagcttaggttagcagaagttttttttgatggatgatgcattaagggatggtcaaaacgactatccctttttataatggagataaaacattgtgatttatgaaagaagaattaatatggcacatgaacttacgctagatgaaattgcaaaatttcaacaagattatcaacgaaacaagcaaaataaaatcgctgaattagctgttgtgaataacggtgtacaaaaagtaagctttaacagtgaaggaattcgtgatttaaatcggaccttctcaattgaaatcccaactgataacgtaactgatcaaaagcaatcaggccgttgctggttgtttgcggcattgaacgttttacgtcacaagtttgctaagcaatatcatgcaaagaactttactttttcacaaagttatctcttcttctgggatcgaattgaaagagcaaatattttctttaatcatatcttagaaactgcggataagcctgtggatgatcgaactgtgcatttttatttgcaagctccagatacagatggtggacaatggcatatggccatttctttgattagaaaatatggtttagtaccaacttatgcacaagatgagagttttactgccaacaatacagcagcatttaaccaagctctgaacatgaaattacgtgaagacggactagttttacgtaaacttgcacaagcaggcaaaaatgatgaagtagaacaaaagcgtcaagaatttttaagtgaagtttatcgcatggctgtgattgcttttggacaacctgtgcaaaagtttgatttggaatttaaagatgatgacggtaattacaaattagatcaaaatcttagtccattagactttttccacaattattttgaagatgatttggatgattatgttgttctctttaacgcgccagaccatgaatatgataagctttacgctttcccatttgaagataatgttgaaggcggtagtccaattagatttttaaatacaaatattgaaaatcttaaggaagctgctattaagcaattaaaagatggtgaaacaatctggtttggttgtgatgtaggcaagcaaagcgaccgtcaaaagggtattttagctgctgatttgtatgaaactgatactatttttaatattgaaactaagttaagcaaaaaagaacgtcttgaaaccggtgcaagtggatcaacacatgcgatgacccttgttggtgtagacgtagttgatggtaaacctcgtcaatggaaagttgaaaattcttggggaacaaaagttggtgaaaagggctactttgttatggatgataagtggtttaacgaatacctctttaaggttgtagtaaagaagcaatacttaccagcaaaattagtaaagattgctgaaggtaaagcaacaccagttccttgctgggattcgatggcttaattgtggtgataaatagatggatattgaattagttaagcaatttaccagggttcatttaaaaggtgaaaaaacaggtcatgattattatcatgggcagagagtagcaaacttagctacaaaaatgtatttaagcgattatcctaatgcacatgaggatagccgagttgttgctattattcagactggtagttatttacacgatacaattgacgaaaagatttgcgaaaatccaagcaaggtaattgcagaaattgaagagctactacctaaagttggatttactgaattagaagtacaagatattttatttacgattcagcacatgtctttttctgacaatattgaacaccactacaagttgcctctcagtggacaatatgtgcaagatgcagaccgaatcgaaagtttgggtgcaattggaatcgcacgagcatttacttatggtggaaagcatggaaataaaatctatgatccagagattaagcctgaaaagttagtaagtcatgatcaatatcgtaatcatgatgaaacaacaattaatcacttctatgagaaattatttgatttagagggattgatgaatactcctgctgctaagaaagaagcacatcgaagaactgaatatatgcgtgaattcgttcaagaatttatggacgaatggaatgtgtaatagaaaagcgccttgtatcaaaaatgatacagagcgctttttttatcaatatattttatttttactaagcaagtgaatcccaagctggaagtggagtaggtttgctttctgcgagtttcttttgatcgtcagttaagaattcttttctaacaactacttcataaacaaactcatcaaaccacttatcgctcattgtgaagtaacctttacggcctgacttttcactccatgagttttcaactttccacttacggatttctcccttatctaagtcgacaccaactagggtcattgcgtgactgacttcaccttcgccagtagccaatctttcagccttagtcatgtaagtatcaacatcaaataattcgtcggtcttgtacaattcagtatctaagtagccagtcttacggtccatttcctttaagacgtcgttaccgaaccaaacactttcgccgtctttcaattgcttgactgcagcttcttttaagtattcgattggaacatttaagaaagtaataggaagacctccattaacgttatcttcgaatggaagtgagtaaagcttgccatattcgtgatcaggtgcgttagtcaagcaaacataatcatcgaagttaatatcccaatacttattgaagaattcaactggtgttaagtttttatctaagtgcaattttttatcgtcgtcgcggtattctaagtcaaaagtcttaggtggttcaccaacagcaattgcagtcatccggtaaatttcgcttaagaactctttacgtttcttttcaacttcgtcggttttaccttcttgaactaatttacgtaaaactaaggcatcttttctttctttacgagctaaggcatcagctaagccagcagtgtggttagtgttaaagctttctggcattgcattggttgggacaacgccgtacttcttaactagtgaagcagccattgcccattgaccaccatctgagcctgcaaagttcatgtatgctttaacagtacgatcatctaatggcttatcagcggaatcgatgattgcatcgtagaagatatttgcacgttcaattttatcccagaaaaagttgtatgcttgggataaagtaaaattcttagccttatactttttaccaaagtcgtgacgtaaggtgtttaaagtggcaaataaccagcaacgtcctgattgcatttggttagtaacgttatcagtttctacttcaacagaaaagacatcatttagacggttagtaactgctggattaaaagatgcttctaatacaccagagcgcattgctgcgcgagaaacaacttcattgcgtgaattatcaaaatcattacggaattgatcaatttcttgtagagttaattcgtgagacatgtaattttacactcctttaatttttttatcatgtttttcattatctttactatacagcaaatgacgacttaatacactaattttattgaatgaaagtagctttcataagtatgacaagggacaatatgaagtataatattgataataatatcggaggtaagactatgaaaaagaatatttttgtatcaggcattaccctaatgactatgcttcttgctgtaggttgcagtaatagtgcaaatcaatctagtactaataacgaagcaaaaagtagtaagacaagccacaagaagagtcataaggctaagaaacatactactaagaaagataagaccgatgtagatactgacgattcagaaactactaattcagataagaagaacgataagagtagtgaaagttcaagcaatactaacggcaaaaagactaataagaacgaatcaactaattctaataattcttctgattcaactggctcaaataattcgaataatgcatcaaattcggctgcatctaacaaccaaactaatggtaagagtcaaaacgcatcatcagctaataacgcttcagatgccatgtttaacaagatggtttctgacacaattaaagagcacggctattcaagtagttatggtccagacaactttactttaattgatggcggcaatggtcaatactctttagctgaaaagtcaactggaacaattgttggtcattattcagtcaagaatggtgaactttacaagcaagatattcttactggaaacgatgttaaggttaaataatggtttactatcaaaaaatgacgccagaaggctatcaagaaattaaagacgagatagcccgtttaaaaaaagatcgaccacgtagaattaaaattttgcaagaagctcgtagtatgggagacttgtcagaaaattcagaatatacgactgctaagatggaattagggcacttgcagagtcgactgcgttatctagataaacaattaagatattcagaaattattcaaaaagatgaaagtggaacaattgatttaggttcaaatgtaaaattgctttttgaaggtgatgacgatgcggaagaatatcggattgtcggcagaatggaagcagacctagctaaaggaaaaatctcttttgattctcctttagggcaggctttaatgaagcaaaaagctggtgcaacagttactgttcaagcaccagctggaagttacgatgtaaaaattattgcagtaaattaaaaaacacctcgctcatgtgtagtgacccacaaaaattggacactttattaatattatgcaactaaggattgattccgatattgaatcggagtcagtccttttagtttactctttgttctttcgtaattatagaaatgaatataatctttaatcgcttgttctaattcattcagattggcatagtttgattctttgccataaaacatctctcttttaagtatgccaaagaagccttccataagcccatcgtctggagaacagcctttcctagacatactttgttcaatgccacgtcttgcaagttcatattgataagtcttatgttgatattgccagccacgatctgaatgaaatactaatccattcaatgaatcattaactttaaatgcatcatcaagcatagtcattacctgctgcaagttgggactacgagagatattataagcgacaatatctctcccacagccatcgataataggcgatagataaagcttttgtcctcttaagttgaattcagtaatatccgtgtaccacttcatatttggtctaatagcaaagaagttgcgtttaattaagttaggtttaattcttccttcaatttcaccctcaaagctgttgtagcgtcttctacgtttcatacgatatccaatcaaattaagtttacgcattaaacgatagactgtttttcgattgattataaagccttcactatgtaagtgatcagttattgttcgataacctggagcagtgtatctatctttaagttcaaagaatatttctttaattcgtttaattagactgtggtgccttatttcatcttgatcttcacgctttaggatatcgtaataattgcttctagataaaccaggtaaatcattatttagatcatttaaaatcgataagatagttttaacacccaacccaagttctagccttaattctctaacagcttgtgctatttctgttttggttggttttttctcttttgaaccaaggcattcaatttttttataaatgcgttctcgacagtaagctttaaattctggcgacgcaattcttcgttttctttcttcaatttctctagttctttgttcacgggttcgtcgtcctttcctcttgataacgacattatacccgttttctttataagagcgaatccaattaataagcatcccttgacttttcaagcccaattctaaagatacagagtaagcagcttcatgattgactaaaacccgattgatagcttctagtttaaattgggctgaataataagtatggggcttatctaatatatccattccatgcctatgaatgagtgaaactaagtacttaatactaactgagcctattccatactttttacttaaatatgtcgatcttttattttcaatagtccattctttataaatattcaatttatcttttttagttaatttagacatagtaaaacccccgaaatccgtgtccgaagttcgggggtcactacaatgcggggtgcttttttataagcaatcaaatttattcaattgtgatggtgttttctttatcttcttcatttaactttggcaaggtaatcgttaaaacgccatcgatgtctttagcagaaatttctttagaatcaacatcaggaatacgatagcttctttgaatgtgaccaacgcttctttcacggtgaataaggttaccattcttgtcatctaagttgtcaaatgagtcgcgactacctgaaacattcaagataccatctttataagaaaccttgatgtccttcttgtccattcctggcatatcgactttaacgatatagtctttgtctgtttcagctacatcagattgcataatgttcttaattgaactatcgtcaaaaaagtcttttggaaaactaaaccaatcgcttaattgatccatcatattatcattgttacgatttttcatcatttcgtttgccataataaaacttccttccattacgctctctacactttctattgtagtagctcagaatagaatgtaaaatatttagcactctaattggtgaagtgctaatcctaatgcaaaaaataggatttagagtaattctagatcctatttttcgtgattagtctaagtctttaccgttagattcaataactttcttgtaccagtcaaaggaatctttctttgaacgctcaagtgttccttcacccttgtcgtttttatcaacataaataaagccatagcgcttgtccatttgaccagttccagctgatactaagtcaatgcatccccaaggaaggtaacccatcaagtcaacgccatctaagacaacagccttttccatttgttcaatgtgttttcttaagtaatcgattctgtatggatcatgaactgagccatcagcttcgcgtttgtcgtaagcaccaagaccattttcaacaataaagagtggcttgtggtaacggtcagttaggtggttaagagaaattcttaaaccttctggatcgatttcccagccccagtcactgcgttgcaatgtaggattttcaacaattgcttcttgtaaatcagtcaactcatcaggcttaactttcttacttgaaacagtagttgattggtagtatgaaaagccaacgtaatcaaccgtaccttcctttaaggcaatcttatcttcttcagtaatatctggacggtagccgtttctttcaatatagtcttcaacagcatttggatattcaccatttacgtgaacgtcagagaagaagtcacgtctttgttcgaacttgtcagcaagtaagacatcgtctgaagatggagttaaaggacgaacaggtgagtagttaatcatacaaccgatttggaagtctggattaatcttgtgtccctctttaacagctagagcagaagcaactagttcgtagtgagctgcttgatacattgctgcttctttttctttatcgcccatgccatttttgaacaaaataccagagttagtagccatcaagaagtcattgttgaagctagattggttatcgatttcattaaaggtcatccaatacttaactttgttcttgtaacgcttaaagcatacccgtgcaaagcgaacgaagtagtcaattaatttacggttagtaaaaccaccatattctttaactaagtgatatggaatttcaaagtgagaaagagtaattaccggttcaataccgtatttgtggcattcgtcaaataagtcatcatagaatttaagacctgcttcatttggctctttttcgtcacccttaggaaaaattctagtccaagcaattgaagtacgaaaagccttaaaacccatttcagccattaatttgatgtcgcccttgtagtggtgataaaaatcaattgcatcatggttagggtaattcttaccagggatgacgccatctgtaatttcacgtggcttagttgcagatcctacagtcattacatcagcaactgacattccttttccgtcttcattccatgcaccttcaagttggtgagcagcaacagcgccaccccataaaaagccttttggcatagtgtatccagtcatattcaatacatcctttctaaagtaagcgttttcgaagttcattctacaaattaaaaactcaattgtaaagattaaaagtatagaattttatttttattataaaacggtctttattgttgcaaccgttttcaattagtagtattatacaggtgttgtctgaattgttcaggaacaatattgaaagggcagatacaataatgactaaaaaagatcagagtttataacaaaagaaacatgatatgagtgtgagatctataaactttagccgctatttaatgattcgttatttttctgcggcgttcttattcactaatctattttggttagtttttgcaatttgttacaaagatattgttgcttcgataatttcgggattattgtttgttttattattagtagcttcagttgagcaagtaagtaaatggaatgtgagaaatactgacttgaagtttacaaaactttattatcagctgcagctagttgcaaatgtaatctttgctataggttgctatttaccatttggaaaggttctgtttccttttatggcaacaaatgatgtcgcaaatgtaatttttacgattttagttgttggaatattaggttctattttgattttaagaagaattagcaacattcaaaatgggcgcgacaaatatgcacgagcaattaagacatttgaaagtaatagacagtaggacaaattgagggggatgtactatgtctgacactgcgcaaccatcatttaaagataaaatgatgaagatactaggcaagttctcaggttcacgttttgtacgtgcaattatgggtgctggttattcgattattgccttttctatcattggatcaatgtttttggtcttaacagttttgactcaagttattactgctaaaggatttgtagatttttacaataatacatttggacgttttaacaatatttatactgttatttacaacgccaccatgggtattatcgcaatttactttgctggatcatttgcttataactatgcagatatttaccgtaaagaagagaatttattgcttgatccattgaacgcagttttcttaactttaatgggcttattcattaccgttccacaattagtatggaagggtggtaacactgtctttgttaacattttaaagaaagataatgttattgccggtggttatggcgtttctggttctgggttaactagaattggtgctacaggtatctttactggtttaatcgttgcctggttaactgttcaaatttatcgtttctgtattaaacacaattggcgaattaaaatgccagcatctgttccatcaggtgttgctaactcatttactgctttgattcctggttttgtgattgcgattgtcattgctttaattgacgttatcttaattgttcttggtacagatattttccaattattgtttattccattctcatttgtttcaaacattgctaatacctggtggggagttttgattatcttcttcctgattcacttcttatggtggtttggtattcacggtgcgactattatttcaagtttctaccaagcaattgttttatcaaacatggctgctaatgcttctggtgctcactatgtatttgcaggtgaattcgcaaacgcattcgtaattatggggggatcaggagctaccttgggtatggcactctggatggcttttgcttctagatctaaacaattacgagaacttggtaaacttgaagctgttcctgctgtatttaacattaacgaacctttactatttggtttgccaattgtttataacgtacgtttatttgttccattcttattagcacctatgacttgttcaatggttgcttatgcagctattgcaactcacttagtacctaagattattgttcaacaaccatggccaattcctgtaggtattggtggtatgatggccactgctagttggcaaggtgctgttttagctttagtcaatgctatagttgcattcttaatttggtatccattcattaagcattacgacaatgaattgcttaagaaagagcaagctggtgctgagaaagcttaattataaaatatagactttgaaaattctcatagttaaaatataactatgagaatttttcatttagggatgtaaataatgaagaaatatgaattagttgcggataaaataaaagattatattactgaaaagcaacttcatcatggtgataaattgccaactataactgacttaatgaagaaatatcaagtcggaaaatcaactattttgcaggcaattactttacttacgcagcgagggattgtctataaggtgcaagggtcaggcgtcttcgttaggcctaccgggcaagatggttatatgtctctaacagacaatgctggttttgcccatgtattaaaaaagcctactacggaagtaatcgagttttcggagaagaaggcacctaagccaatcagtgaacatcttcattctaatgaagaatgctactttattaaaagattgcgcaaacaagatggtaagccctttgtcttagaagagtcatattatcgtaaaagtataattcccttcatgagtaaagaaatcgcagaatgctcaatttttgattacatccgagaaggactaaagaaagaaattcggttttctgataagtatatgcgtgttagaaaattaactgctgacgaggcaaaataccttgaattaaaagaaggagatccttgtttagaagtctatgataccttctatttagctaatggaactgcttttgatagttctaaattggtttataattacaaaaactctaaattttacgatcaaagttctgatgatattatttaacaaaaatagccctaatctcgaaatattgagactagggctattgttatttggcgtaagctaacacattattcttcatttgctttagttgttttttagcaccttgttttaactgccagttgtaaaaccaggtaccaagattagaatgttttttttcatcaaaactaagaacgtcttctttaaaagtgatctgacagccacgatcattgtcttctaaataataagcaattttaacatctagcttagaagatttaaaaattgaaacgtattttttaccgaattcgtactcagtgatttcggctttcacgtttccttgctgataggtagttcctgcagcaattttgacaggtagatcattatcacgcgttcttttaatagcttgtaatagcttgcgtgagctgcatattaaggtaattgaagaagtcttttgctttaaacttggcttggtctgtaattgtaatcattttttgtctttctaactcttaacttgttaaaaaaatagagcctagaaaatgctaggttctatttttattttagtctaaatctttaccatgggatgcaataacctttttataccagttaaatgaatccttaggatatctcttcaaggaaccgttgcctttatcgtcgcggtctacataaacaaaaccgtagcgtttcttcatttcaccggttccgtttgatactaaatcaattgctgaccacatagtgtagcccattagtggaattccgtcttcgttaactgcttcttccattgatttaatttgagcacgtaggtagttaatgcggtagtcatcatgaaccttatgatctttagttaattcatcgccccaaccaagaccattttcaacaataaatagtggcttgtggtatctatcccagagatcatttaaagcaattcttaaaacgtcagggtctgttgcccagccccaagcattatagtcaaggtacgggttcttaacgccacctgctgacatattgccgtttgctttagcgtccgtttcatgcgttgttaagacattagatgtgtagcaagagaaacttaagaagtcaaccggatatttctcgattagttcgtaatcttctgggcgatcatctaatttaatgccatctcgttcatattctttaagacggtattcaggatagcggccacctgtttgaacgtcagaatagaaaagcatttcttgcttagctttcatgactaaaagctgatctgcggggtctgatgtatatggatagtaagcagagtaggcgagcatttgaccaacttgattatttttatcaatttcatgcgctaatttaacaactttgctgctggctacaaattgattgtgagctccttgagcacgattttgcttgctcccatcaattaagcctccacccatataaggagccatgtccatggcattaatttcattaaaagtcagccagtatttaaactttacccttgtagtggttcataacgatgtctgcgtagtgaacgaagatatcgatcatttttctatctttccagccaccaaagcgattaatcaaagataggggagtttcatagtgcgaaagggtaacaagtggctcaattccgtacttagcacattcatcaaagaccttgtcatagaaagctaaaccttctttatttggctcttggtcgtctccatttggcaaaatacgcgaccaatttagagataaacggaacatattaaagcccatctcagccatatatttaatatcttcttgataatgatggtaaaaatcagttccttcatggctaggatagtaatagttatctaaaagtgctggttttgcaccatcaggtaatttgaattctttaccccaagtcattggagtgacgcctgttttaccatcgtttgttttccaagttacttttcttggctcagtagcagaaccattagtcaaaacatcaatagcgtttagtcccttgccgccttcgttatagccaccttcatattggttagcagcactagcgccaccccaataaaaattctttggcattgagtaggttttagtcattatttttcctttctttatttgtttaaatttataaaaaaagttctagacttgctctagaacttttacttaaaagctgcttgtctctacaacgacataatttcgttcatcgtagcgattacgactggttgaatattcaactggttgaccattatttaaccatacgatttgctcaagctctaaaattgggtcattttttttagctttaagatatttttgatcccaatcgtctgctttaacagccttgattttacgatatgcaatgccaaacttaagtttcaagtcttgatgaagataattgtaaatagaattgtgtaagatatcttcagttaagttaggaactaagtgaactggcataaaagtgtgttcaagaatcagtggctttcctttaagtcttcttaaacgccggatattataaactgggtcgctagactttaatttgaggtaatgttgaatattttcattgggaaactcaacattaaattcaataatatcgctagtaacctcatctgatccaagtaggttagccaagccactaaaggcatttgctggtgaatcaaatttatcttgaattggaactggacctaagacaaaagttcctaaaccagattctttataaacaagaccctttctttgtaatccatctaaggcttttttgacagttaaacggcttacttgtaattcgtctgcaagtgttttttggtcaggaaggggagcttgagttttgtagactccatcttcaattcttttttgtagaattcgagcaacttttaagtattttgcttccgcagtcattatttttcagccatttttttgtaaacagctactacttctttagctaaatcaataaaggtaatagctgtcatcaagtggtcttgagcgtgaaccatgtaaaggtcaacttttacatggttaccttgtgcttcttgagtcaacatatcagtttgaacattgtgagcatttactaagccttcatttgcttgcttaataaattcatcagccttgtcaaagtcgccttttttagcagcttggattgcttgcatagcagcagcttttgcattacctgcttgcataataattcccattacaacttgcatgttatcgctattttcttgtgccataatttaattctcctagatagtatttttaaaataaaagatgctcctgacaatactttattttactatgtcagcgagcatcgcccataaattatttttgttttaattcttgaattccttgatcaattgctgcatcacagtcaattggtagttgcagcatcatttttccgtctaattcaagccccttaggaatctgaataatacctgggaaatgatagccgtgatgggctttagtttcattatctatatagataatgaaacttgttcatctgcgctaacgccaattttgaagtgatgaccatcacgatcaaattcattaacaatttttatttcgtcattcattttgactatttgtcgcccattaattcttgagcagtttcaagaacgtgttcgccattcatcatgccgtagtcttgcatgttaataactgttaatgggatgcctgctgcatcagtaatcttcttaacactgtcttccatgtattgaacttgaggcccaagcatcaatatatctgggtgttccttgtcaatttcgtcttgaatacctgatgctgcagtagcaaagatcttgtagtccttgcctttttctttagctgcgttttgcatcttggatactaataatgaagttgacattcctgctgaacaagcaagcataatagttttatctgccataataattatctcctttgtaaatacaattaagtgtttttcagtgtttgagtgttgatctataaattaaatgtatgcactttcatcattgaaagcatttacattatagcgctattttaatgataagtgtcaattaataactgaaaaaattatttactttcagcctcgtctttcttgagagtagcagcttcacgtttaacaagaatgttgtcgtatttcttagcaaatggccagtaaattaaggttgaaattactaaggtacatgcttgccaaattgccatcttccagccgccaattaggaagccagaaataactgctggcatcgtccatggacaggcaaaaccatttagaggaggaacaataccagttttaattacgaagtaagttgaaatagcaactacaactggagttaagaagaatggtattgcaaggaatggattcataacaattggtaaaccaaataggaatggttcgttaatgttaaagataccaggaactaattcaactttaccaattgaacgtaattgtgctgatttagcagcaattaagataaagataattaaaccaatagtaatccctgaaccagttaagttaatgaagttattgtagaattcattagtaacaacgtgagcaccattagcaatagttaacttgccggccttgtataattgtgcattatcaaatgagtttgcttgaagcataggaccagctaaggatccaacaattaaaccaccatggacaccgaagaaccagaagaatgggactaagaatccaatggcaattgcaccaccaagtgaatcagagataccttgaagtggaatttgaagggtttggtaggtccattgtaagaagtctgaaccagtggttagcttgaagcctgcgtaaataagcatagtaccaattaagatcattcctgatggaatcatagcagtaaattggttagaaacagctgctggaacttgttcaggcaacttaatagtccagccttttttcataatagttgaataaatccagccgactaataaaccaacaataattgcggcgatcataccgtctccgccaagccaggtaatattaaatacgcctgtaactggggattctaagaaactttgtaaagcatgtggtaacttgtcaatattttcggttacagctttagcagtcatttgaccgtcgatacctttagccatggcattctttaatggactgtcaatagttaaagtttgaagcattaagaatgatgctaaagaagtaagaccgggagctaatggctcatagccttcatttttaacataaatataggcgataccaacagatgcccacatagccatgatactaaaagtagtagtgtaggcttggttaaagaatgctccccaaccagaagcattgcttgcatcagctactgatttgattggaatatttcctagaataaggaagatagaaccgattaagataaatggtaaagtgtaaatcataccattttgcaaggcttggatggccttggtgttaacaaatttcattactgggggcaagatgtgtttattaacgaaaacactaaagcccgattttttctgttcactcattatatttcgtctccattattctttaatactttttggaaccaataaaatgatttcttaggaacacgttttaaatcttttaagtcatggtttgaccggttaacatagacagcgccgtaacgcttttccacatcggcatgcgaacttggaatatcaattagtccccagcctagataaccaagaactttggcaccatctaaaaacattgcatctttcattgctttgatatgttcttcatggtaagcaattcgttcatcatcttcgatcatatgctcgccgtcccaagtttcttttaagccaattccgttttcgattggaaagactggaatcttgtagtggttgtacatcgtcgtaatagcgtttctaaagccaagtggatcaatcgtccagccccaagcattagtcttgagatacttgtttttaacaccgccataattcatgtaacggttaggtgcgatgtcttctggaattttgtcagctgagagagtccaagaagagtagtagctgaaagctaagaaatcagcttgggcttttttcatttcttcttgatcttcatcagtgatatcccaattaatatggtgatcttttgcatattgcataacttctggcgagtaaccacgcccagtatctgcatcataaatattaaagttcaaaaattcttgagcttgcttagcagcccaaacatcagtggcttttgatgtttctgggtaaatttgctggtaggcaagcataccgccaatttttacatcatcatatttttcatgaatgtaattagccagtcgaatgtggctaatcattgtatggtgaaagatggtgtacatgtcgtctaaggttttatcgcctttttcatagccagaaatattgaatacttcatcttggaagtagagattatgttcattaaagacaatccagtatttaactcggtctgaaaaatgatcgatcatctttttaccaaatctgacaaaggcatcgacaacatgtcttgacataaagccgttatattctttggctaaatgtagtggcatgtcgaagtgataaagacaaatcatgggttcaataccacgtttgagcatggcattaatcaatttgtcgtaaaaatcgattcctttaagattaaattttccgtctccttcaggacaaactcttgaccaggaaatttgaatacgatacatattcatattcatttctttcattaggtctaaatcttcgtcataacggtggtactcatcaattgcggtgtgccaatctgtggtgttttctgtagcaggtcgtacatcgtaaactgataagcctttaccatcctcattccaggcaccctcagtttgcatacttgaaactgaattgccccagaaaaagtctttaggcattttctgcttattcataatattccctctttgcaatcgctcacacgttttacgcgtataaatataaacttattttatataaaagtaaagcactttaatataaaaaatatatacttttgtaaaattggataacaaaaaaagaccgagatagtattctcagtcctttttgtgatgctttcaaacacatttatttaataataaaaaagtgtctatataaaatttaatgctctttttcaaaatctgcaacagctccacgcaaatttgcttcattttttaaggtacagatgtctaaaattggcttaacagtcgcaatatctaatttatttcttatttttgatatttcatcattaagaagaggtattaattcttgattttgagaaattccgccaccaatgataattttttctggatcaaaactatgttgaatattataaatagcagtagctaaagcatggatcagcttgccgcgttcttcctgtgcaactaaatcatcggtgtcagcaagttcaaacactgtctttccatcaaaatttttaccagttttttcattatagcgtttagccatagaaacaggagaagccaagacactaagttgctgaccatcaataatcataaagccaaactcaccgccgtatagatgagcaccatgccaaatttggttattaatgataacactaccgccgactccagttccaattactaaaaatgccatactgcggcaatctttagctgacccagcaactaattcagctagagctgcgcaatttgcatcattttcaatacttactggcaaaccaaagcgtttttctaattcaggcacaattttgaaattgtgaatataaggtagagcactagcgccttcaattactccagtctttttattaacagcgccgggtgaagaaatagctacaccgtcaattttattattagttttgatttcattaactgcatcgcttagtttatgataaaaagtttctaaattatcaggcgtatcgacagtgaagaccatctttaattttttatttatccaagtagcgattttaattgttgtcccgccaatatcaattgcgattaaattcataataaatatttcctctcttattcgagttactttcatgctaattatatatgaaggcgatttcaataagtatatatttttcatgtactataaataacgttaactgctttgttataataaagggagttgatatgaaagggaagaagccatgaatacgccatcatcaaggcaaggaaatttaactagatatgctgtttatttggttctttatttgatagtaattggaataaagaaattaacattattagatgatcaagtaaataagattggatattttttctttttaatctttacgctctttgccttatacttttacattaggcaattcaatcgcgaacaacgattctttgaaaaaaagccaagtatgccacttttagcagattacagttttcttgttggtgtatctatcttggtgatcttaggacgaatttttatttcctatcttcaagccaaaggagcagttcccttgatgaattttcagataatttatcaaaagggcgaaagtaatcttttattctggttctttattttttcaatcggaatcttaatcccagcgctgcaagtgtatttaacaagtggttttttctttaattatggctttagggcgcaaaatatgactagtggagtagtgggaataatttgctctggttttttctttggtattcttaattttcaagcgtcattagctttatttgtgatcaacagcctttacggaatgctgtttgcctggtcatatttatattcgcagcgcattttgatgccaatttatttagcaattttaaatggaatttttatggtgatcttagcataataaaaaacgagggacagaatgttcctcgtttttttatataagcggatagcgtgaatcgaacccgcatcttcagcttgggaagctgacattttaccattaaactatacccgcgtaagcaaaatgattatatcatttttgttaacgatgtggcaactgatgccgagctaaattatattctgaacgatcaagcagagaagtgaagttttgaaaaagccagcgacgtaattctgatggttttaagactaacggcatgcgttcatgaacgggaagaacagtattgttagcaacagttgttaccattgaaaaatcgttgccttgataaatgccagcgattaaagtcattggttcttctatagcagtaaaagatgagtgctcatggtaagtttgattatttgaggcaaggtaagtttgtttgctgctttcccaaaattcactggctaagataatgcagcgctgccgagcaaatgagttgtcccacattgacggtttttcttcgtaaaaacgttctacacgggcattgtagagaacgcgattcttttgaaagggactcggatagccccatttcttttcaaccagttttaattcattgttgctgtaaagcattactagggatgaagatttaggataaatttgtgtagcagcagaaaatttatcttcgatatttttaggtacaatcagtggtaatttcaagtcagttgttaggtaagtcttgatttctttaagagatggcattgcaaaatgactacacatgatttttcactctttctatctttagttaattattttaatttcattctaacaacttttgagtaagtttaaacgaataaggttttttgctagaattggaggtaaagctaaagattaacaaatattggagaaaattatgacgaaagaaattttattaactggagatagaccaactggtaagcttcacattggtcactatattgggtccttaaaaaaccgtgttaagctgcaaaatgaaggtaaatatgaaccttacattatgattgcggatacgcaagccttaactgataatgcaagagatcctgaaaaaatcaaaaatagtttgattcaagtagctttagactacttagctgttggtttagatcctgaaaaatctactatttatgttcaatcgcaaattcccgctctttttgagttaactgcatattacatggatttagtaacagttgcacgtctagagagaaatccaaccgttaaaactgaaattaagcaaaagaacttcaaggattcaatccctgtaggatttttaaactatccagtttctcaagcagcagatattactgcttttaaagcgacagtagtcccagttggggatgaccaagaaccaatgcttgaacaaactcgtgaaattgtacgtacttttaaccgagtttataacactgatatcttagttgagcccaagggctacttcccgccaaagggtcaaggaagacttccgggattagatggaaatgccaaaatgtctaaatcattaggaaatgcgatctatttatccgatgatgcaaagactgtgcaaaagaaagtaatgtccatgtatactgatccaaatcacatccatgtggaagatccaggtcaagttgaaggtaacactgtctttacttatcttgatgtatttgcaccagacaaggataaggttgctgaacttaaagaacaataccaaaaaggtggcctaggtgacgttaaaattaaacgttacttaaataaggttcttgaagaagagcttggaccaatcagagaacgtcgtgaaaagtttgctcaaaatccagatgctgtttatgaaatgctactagaaggatcaaagaaggcaaatgaagttgctaatcagactctacaagaagttagagaggcaattggtttaaattattttgatagattaaataaataatttaaagagggtaagaacaatgacaagagacaggattccgtggaagcaatattttatgatgcaggctttagttattgcacaacgttctacctgtgatcgtgccttagtcggaagtgtattagttaaagatgaccggatgattgcgaccggatataacggtagtgtttcaggacagcctcattgtgatgatgttggtcatctgatggttgatggacattgcgtaagaacaattcactctgaaatgaatgccttaattcaatgcgctaaaaatggtatttcaactgaaggtactgaaatttacgttacttattttccttgctttaattgcagtaagtgcttagtgcaagctggtattaagaaaatcaactattattatgattatcatgataatcctttagccttgaaattattgcgtgaaaagggcgttgcaattgaacaagtaacgcttgatcataaatatgttcaaagcttagcagacaggctggagaaggctgacaatgaaaaataaagtcattggtttagtggcactattaatttgcatattaacattgactgctagcacaaaatcttttgttagtgatccgcaaggactatttgataatcagacgaaagaacttgttaatcaaaaaaatgagagctatcaaaagactaaaactaaacctgaaattcgccttttaagcttaaaagacagcaaggatttaaatcgaattcagccattaaagaatcagataattattgccgttgcccttcaaaataaaaagaaaaatgttcaaattattgttggtaagaattatcaagatcttttaactcaaaataaatgtggcaacattattcggtatgcagggaataaattaaggagcaaaaaagcagctacttttaattctgggattcgactagtttttaatgcttgcgctactttggttgctcaaaaagataagctgtcttatgataaaaattcgttaacacaagatgaactgcaaaaaatagatcatccacaaagtgtaaacttggtttggggattagtaattgcagctttaataagttttggattagttctatttaaaagctttcgaaaaaagaagtagggacttgactaattcttagttagccgttaaagtatcaatagaaattaaatattagagcaaataaactgttaggtgagactcctacgtgaacatatgctgtcgcccagcaacatccagagatgccaacgggtcaaacagggatcgtcgatataaggccctccccagccagctagttatttttaataaccttacgtcacgtagtgttaaaactgaacgacgagtataaaaatcgcttggatttgagccgatgcagtttttgcatcggcctttttgtttgtttgctaggttcttaagaaaggatgttgaagatgttcaaaatcaacacttccggcacaagaaatactacagacaccaagctggtgcgccggattgcatgcgaagataagtttgcgacgctgcaacgattaaaaacctcaattagcggccttcaaagtaaagatgcgaggcaacgcttagcaaagtacggatctaatgaaataataattaaacatgataagactaaacttcactatttgttaaaggcttttgtaactcctttttccctcgttctgctttttttagcaattgtagcaatttttttaaattcttctcaacgtactcttaacctaagtccagcaatttttgttttagcaattttatttatttcagtaattttaactgctatgcaaaatattcgtatcaatactaatattcaaaacttgataaatcgaatttctagaacaactcaagtaatgcgtgattgtgaaccacagaaacttttaactcgtgatctaacaattggtgatgtggtactacttaaagctggagatattgttccagcggacgttaaattactcaaaagtaatgatttagaatgttcattacttggtgaagaagatactgtgaaaaagagtgctactaattacactggcaaaaacaataacttagattacgctaatattttatatgcaggcacaattattctttcaggttcaggaattggcgttgtttttgcgactggtaaagaaactgtttttggaaaaatagctcaaaatctttctaagattaatctagaaaacaatctttttaattttagtatgaaaaaattaactaaaatctttttgacattaatcctgattattgttccagttgttttgctgattaatgaaataatacgtggcaattgggaaaatgctttaattttcgctatggcaattactgttggtataacggctggagtaatgccgacagctattgtaaataatttggtaaaggccaatatcgatatgcctaggattcgagcgacatatgacaattaattatctaaatgatttgtagggattccgtattttacagaattcctttttttaatgtacaaattaagtcctacatgctatgttatactagcaattaaaagacttatgagaggaagaataaagatggctgaaaagaaaactttttatattactacacctattttctatccatctggaaaattaactatcggtaatgcttatactgcgattgctgctgatgcaatgacgcgttataaaaaatctcgtggttttgataccttctttttaacaggtactgatgaacatggcttgaagattgaacaaaaagctgaagcacaaggtattaaacctcaagagtttgtggacaaaatggcagcttcttataaagagttatggaagatgctagatgtttcttatgatcgtttcattagaacaactgacgaagaccacgttaaggctgtgcaaaagatttttgaaaagctgttaaagcaaggcgatatttacttaggtgaatatactggttggtattcagttgaagatgaagaatactttactgaatcacaacttgctgaagtttatagagatgatgatggtaacgttattggcggaaaagctccatctggtcatgaagttcgtttggttaaagagccttcatacttctttagaatgagtaaatatgctgatcgacttttacagtattataaggatcatcctgactttatcttgccacactctcgtgaaaaggaaatggttaataactttatcaagccaggtctagaagacttgtcagtaactcgtacaacagttgactggggaattcctgtgcctagtgatcctaaacacgttgtttacgtttggatagatgctttgtcaaactatattactgcgcttggttatggctcagatgatgattcattatttaagaaatactggccagctgatgttcatttagtaggtaaggaaattgttcgtttccacacaatttattggccaattatgttaatggcattagacttgccacttcctaagcagatttttggccatggctgggtcttaatgagggacggcaagatgtctaagtctaaaggtaatgctgtttatccagaaatgattgctaagcgttacggattagacgcacttcgttactacttgatgcgtgcaattccatttggttcagatggtatctttactcctgaggatttcgttgagagagttaactttgatttggctaatgacttaggtaacttgttgaacagaactgtttcaatgattaaccaatatcaagatggttacgttgcaccagttgcagcagatcaagatgaatttgctcaagacttgattaagacagctaaggaaacaatcgctgaatatcaaaagcaaatggacgctcttcacttctctcaagctttagacagtgtttggaagcttatttctcgtgcaaataaatatattgatgagactactccttggactttgaataaagaaggtaagagtgaagaattatcaaaagtaatgtctaacctagctgaaagtctgcgtttagttgctattttaattgcaccagtaatgactcaaagcccagttaaaatgtttaaccaacttggtcttgattggaataaagaagctcaaaagaaacttgaatttggcgcttttgactgggacattaaagtaactgaaaaaccaactccaatcttcccaagacttaagaatgatgttgaagttaaatacattaaggaagaaatgaagaaggcaaagccaaagaagaagactagaagccagcaaaaagaagagaaacatattacgattgatgactttgacaaagtaaagattcaagttggccaaattttatcagttgaaccggtaaagggttcaagtaagcttttaatgtttaagctagattttggcgatggaaatgaacgtcaaattttgagtggtattcgtaagttttatccagatgcaagtgaattgttagataaaaaagtactagcagtaactaacttgaagccacgtaagatgttaggtcatgaaagtcaaggtatgcttttatctagtgaaaaagatggccaagtcaaattagctcttgtaggcgatgaacatgaagttggggctgaattaggctaatggagatttttgattcacatacgcacttaaatgacgtgccttttcggggaaaagaagagatctaccttgatcgagctaaagaattaggtgtagtaaaaagtgcagttgcaggacaagacccagaatttaatgagcgtgcgattgatctaagtcaaagatttgataatttatacgctattgttggttactgtcctgatgtagctaaaggctatgatcaaaatgcagaagatgtattagtagaacagcttaagaagcccaaaactgttgctttaggagaaattggactagattattactgggatgaatcgccaagaaatgttcagcgaaaagtttttgcaaggcaacttgatttagctcatagcttaaagatgccagtaaatattcatactcgcgatgcttttgaagatacatatcaagttttgaaaaatagtcatgtgggtgaatatggcgggattattcataattttaatggtgatccagaatggcttaaaaagtttcttgatttagggatgatggtttcattttctggggtagtttcatttacaaaagcaattgacgtacatgcttctgccaaagttgtgccttgggataaatttttaattgaaactgatgccccatacttaacgccaaaaccataccgcggaaagcaaaatgaaacaggatatgtacgctatgttgcagaggcaattgctaagttgcgtgatgtatcggttgaagaagtggcaaagcacacatttgaaaatacgatgagggcatatggaatcaaataatcaaaaacagttcaatgcagtagtagttgttgaaggacgagacgataccaagagattaaaacagttcttcccaggaattgaaactattgaaactaatggctcagaagtatctgatcaaactttagcagagattaagaaactagcaaaaacaagagaaataatcatctttactgatccagactacaatggtgaaagaattagaagactagtgactaatgctgcgccaaatgctaaacaagcttttatcactcgtaaagaaggagaaccaactaagcgtggaaacagcttaggagttgaacatgcttcaaaagaagcccttgttcgtgctttaggtgatttgcacgaaattcaagcagtagagagtgatattactaaagaaaaatacgatgatttgggtctcgcagttagtccggaagctcgtcttttacgtgaaaaagttggaattaagttaggaattggatatggaaatagcaagcaattcttaaaacgtttgaagatgtttggaattacttatgatgaattaaagagggcagttgaagatgtcaaatagtatgccaattgctagtccagtccggactcaagcgattgttaatcgctactttatgcatgcaaaaaagaatttggggcaaaatttcttagtagatttggccgcaattaaaggaattgttgaagcagctgatattcaatcaggtgatcaagttattgaaattggaccaggtattggttctttgactgagcagcttcttttagctggagcaaaggttttagcttatgaagttgatcaagatttgcctgaaattttgaaaaacgaattaccacaaaaaattgatggtgaagagttaaatagtcgctttaaattagtcatgaaagacgtattaaaggcaaactttactaaagatagcgatggttttcttgacttaaataagccggttaaaattgtggctaatctaccttattacatcacaacgccgatcatttttaatttaattaaaagtgatttagatttcagtagcttaacgttgatgatgcaaaaagaagtggctgaacgtttagttgctatacctaagactaaagaatatggtcctttaaccattgctgttcaaagcagaatgaatgtagagttagcagaagaagttaaaagtacttcatttatgccacgtccaaaggttgactctgcagttgttgtcttgacaccacttactgaaaaaccaaatattgacgattattctttctttgatcatgttgtaaaaatgtgttttgcgcagcgtcgtaaaacactagctaacaacttaaaatccttagtcagagataaagatatgcgtgaaaaaatgattaatgatttaggactagatcttcgagttcgtccggaagaattaacgctaaatcaatttgtagagttggcacatcttttaaaagatcagcaagcatagaacgcttacaatttacagacttgaaaaaatattaattttttgataaaatagtaaccaagcagaggagtgacgtccagtgccaacaacactaatggcaattaaacataatttggattctcatttgggcgaaagcttggtagtagtagctcaagcaggaagaaagaaagtaacacgccgcaaaggtagattaactaagacttatcgtgcagtgtttgtagttgaccttgatcaagatcaaaacaactttgaacgagtatcttacagttacacggatttattaaccaagaacattgagcttgagtttgatgaaatgtaagcgacaatagaatatattacgaacaatcactagtatttttcttaaaatgctagtgatttttctttagatagagtatatttaagtttagaaatttaatttaatgtttaggaaggtaaaagcatgaaacgttcagaaagattagttgatatggttaagtatcttttagctcgccctcatactttgattgcattgccattttttgcagatcgttatggcgcagctaaatcttcaatttcagaagacttggcaatcttgcgtcaaactttagctaacgatcaaaatggcattttagaaactgtagcaggagctgctggtggagtgagatacattccttttgttggaaaaaaagaagctactaactatcttcatgatttggctgaccgtatcgaagatcctgatcgtattttacccggtaattttgtttacttatctgatattttaggatcaccacaagatttgcaacaaatcggacaattaattgcaactaaatatgcttatagcaatgttgattatgtaatgacaattgaaactaaagggattgctatcgcgcaggcagttagtcgctttttaaatgtaccatttgtgatggttagaagaagacctaagattactgaaggatcaacaatctcagttaactatgttgcttcgtcaagtgaacgagttgaaaaaatggaattagctaaaagattacttccagaaggaagcaatgtattaattgtcgatgacttcatgaagggtggcggcaccttaactgggatggaagaattagttaaggaatttaagggaacagttgctggaatgtgcgtcctttgtgaaacaaaatacgcttcgcaaaaggtcgtagatgattatcaatcattgattaagattactgaagttgacagaactaaaaagttaattaaagtgcggccaggtaatttcttagagcagacagacttcaatcgttttccaaaatgatatactgatagttgtttaaatataaaaattgaagggatataaaactaatgaataagtatgttgttatcttagctgctggaaaaggtacccgcatgaagtcccaactttacaaggtattacacaaggtttgcggtaaaactatggtagagcatgtggtgaatgctgctaagggcactaatccagataagattattactgtagttggaaatggtgcagatagcgttaaagatgttttagcaggtcaatcagactttgcgtttcaagaacaacaattaggtactggcgatgctgtactggcagctagtgatttgttagaaaacttagatggctcaactttagttgctactggggatacgccattatttactgccgaaacttttaacaacttatttaaaaagcatgaagaaagtggaaatagcgcaactgttttaactgcaaaagctccaaacccatttggttacggccgcattattcgtgacgaagatggaaatgttttaagaatcgttgaacaaaaagatggtacgccagaagaattagctgtagatgaaattaatactggtgtcttctgttttgataataaagagttatttaaggctttaaaacaagttggcaacgacaacgctcagggtgaatattacttaactgatgttttagaaattatgcgtaaagctggtcataaagttggtgcatatgaaatgcctgattttagtgaaagcctaggagttaatgatcgaattgcccttgctcaggccactaagattatgcaaagaagaattaatgaagaacacatgaaaaatggcgtttcctttattgatccagatacagcatatattgatagtgacgttaaaattggtaacgacactgttattgaaggaaacgttgttattaaaggaaacactgaaattggtagtgactgctatatcactaatagttcaagaatagttgattctaagattggtaatcatgttactattacttcttcaactcttcaagaagctcaaatggatgataatactgatattggacctaattctcaccttcgtccaaaggcggttattagaaaaggtgctcatatcggaaactttgttgagatcaagaaggctgaaattggtgaaaatagtaaagtgggacacttaacctatgttggggatgctactttaggtaaagacattaatattggctgtggtactattttctctaactatgatggtgtgaagaagttccatactaacgtgggcgatcattcatttattggtgctggtgctacaattatcgctccagttaatattgctgatcattcatttgttgctgctgattcaactattactaaagacgttgcacgctatgatatggcaattgctagaggaagacaaactaataaacctgattactggcataagttaccactctcaaaagataaagaatgggaataaattaaaagaagttgttaaacacaacttctttttttgctatttacaagcgtaaagggtatttttttgctattattaagtatggaattgtaatttttcggtggaggaaattatgtctcaattagacaaagaaatcaaaatttttgcgctcaactctaataagcctttagcagaaaaaattgctgataaggttggagttaagcttggtaagtctgatgttaaacgtttcagtgatggtgaaattcaaattaacatcgatgagtcagttcgtggtaaagatgtttacttggtacagtcaacttcagctccagtaaatgataatttaatggaattattgatcatgattgatgctgttaaacgtgcatcagctagaagtgtaaatttagttatgccttactacggatatgcacgtcaagatcgaaagactcgcgcacgtgaaccaattacagctaagttagtagctgatatgttgcaaaaggctggtgctgatcgagttctttcgcttgatttgcatgccccacagatccaaggattctttgatattccagttgataacttgatgggtgcacctcttcttgctgactacttcttgagtcatgaattagaaaaagatgctgtcgtagtttcacctgaccatggtggtgtaactagagcaagaaaattagcagaatttcttaagactccaattgccattgtggacaagcgtcgtccaaaggcaaatgttgctgaagttatgaatattattggtgatgtaaaaggcacacgtgcaatcattattgatgatatgattgatacagcaggtaccattaccttagcttctcaagctttaatggatgctggtgcaactgaagtttatgcatctgcaactcatgctgttttatctggtccagcaattgaacgtttgaataattctcctattaagaaattaatcttaactgactcaatcaatcaacctgaagaaaaagacttgtcgaaggctgaaattgtttctgttgggccattgatgggtgaagcaattaaattgattcaagaacataaaccagttagtccactgtttaatactcgttttcaatcacataactaaatgaattataaggcggtacctataggtaggtatcgcttttttagtactttaaaataatagttttaatttttaggatcgctaagcgtttacattattagaataattaaggtaatattaagttataaagttttaaaaaaggacttaaaagtattatgactactttatctgatgtagcgaaaaaagctagcgtgtctaagatgacggtatcgcgcgtcattaaccatcctcaacaggttacgcctgaattaagaaaaattgtcgaacaggcaatggaacaattaaattatcatccgaattcagttgcaagtgccctagcccaccaccgtacaaatgtagttaagctagtaattctggaggatatttatacaactgaaccctattacatgaatctgctttttggaattgccagtggattaggtaagaagcactatgcattgcagctagcaaccgatagcgaggttagcggcggcgatggctatattatcacgggtggcagagcaaatgatgcaaaatggttagaccaattaaataaaccttttgtgttatttggtgaaaatcgttatggttatgattttattgatactgataataaattaggcgaacaaattgccacacaatatgctctagataaaaactatcagtcaattgttttcattggaattgatgaaaaagagccttttgaatattcaagagaagctggatatattaacaccttgcagaagcataatatgattcctaaaatttttagaatccaaaatcatagtagtttagctgaaaagttaattattagtgattggaaaaagtttgctcctaacacttgctttatttgtgcaagtgaccgaattgcagttggtgttgtacgtgctattcaaagaaaaaatggaaatattccacgggattttggaattattggctttgatggagttttcttagatcaggtatctaatcctaagctaacgactattaagcaaaatttatttaatttaggtgaacttttagcagaaatgattttgcaaaagattcaacaaggcggagctcagcagggcgaggttcttattgaacctgaattaataaaaagtgaatctactagaaattaagaagctactggtgagcttctttttttgataccggtaacatttaaatagcattgtaagcgcttaaaattattgcttaaaataagatttatggaggaagtttattatgagacattggtatgaccgagcaattatttatcaaatttatcctaagtccttccaggattctaacggtgatggtattggcgacttaaatggtattagaaaaagaataccgtatttgaaggaactaggagttaatgctgtctggctgaatccagtctttgtttcaccacaagttgataatggctatgatgtatcaaactattttgccattgaccccaaaatgggaaccatggaagatatggatgacttaatcaaagaaatgcatgaagctggaattcatgtaattatggattttgttttaaaccatacttctgatcaacatccgtggtttcaagatgcaattaaaaaccctgatagtatttatcgagactactatatttttgctggtaaaaataatcagagaccaaataattggggaagtttttttggaggtagtgtttgggagaaagatcctgctggaacagggcaattttattttcatctttttgataaaagaatgcccgatttgaactggaaaaatcctgaagtcagacatgcaatgagtgaaattgcaaaatattggctagaaaagggaattgacggcttgagattagatgcctttatccatattgctaaagcagatttaaggcaaaatttcccagttaatagtgaaaatgaagaacccgtgatagctgagccattttttgcaaacttaccacaagtacaaaaatggatgcgacctttctgtgaggaaataaagcaagattatcctgatgcactattgttaggagaagcagcaagcgcgaatgttaatttagcagttgattatacaaataaagataatcacttgatggatagtgtaattacatttagatactttacagaggatcaaagtcagattgatcctagtttttcagctcaataccagccgaaatcattagatttagtaaaatttaagcaaaatcaggctgtttggcaacaaactttaagtggtgtttctaagccaaccttgtactggaataatcatgatatggctagaatagcgactagaattgctaaaaatgatattcaagctcggagcttagccatgctcatgtatttacaaaatgggttgccgattatttattatggcgaagaactcggaatgaaaaatttggagtttgaagacgcaacacaatttgaagatgagacagttaaagaatttattgaaagcgccaaaaaagctggaaaaactagtcaagaagcattactaatggcaagtaaaacccataaattgccagctagagggccaatgccatggaataatgaaaaaaataatggctttagtgatggaaatccttggcttaaaggaaagaaagttgattatgctaatgcggctgatgaaatagcagataaccatagcatgtttaatttctacaaaaaattgatcgccctaaagaaagaagcattgtttgaagatggtggctactatttattaccaacgtcaaatgacagctatgtttatgagcgtaatttagaagatcaaaaagcattagtcgctgtttctttaagtaaagatcctattgagcttgacgtagatcctgaatttaagcaggaaaaattagtagcaggcaactatcaattgaaagatggaaaattaaaattagctccgtatgcgggagtagtattagaaaaagactaaggagtaaaatatgcaactagcagctttaaaacatagaactgaaagtgaagactgtacagtaattgatcactcacacgtaaaaattagacttcatactgctaaagacgatgtaaaaaaagtctttgttcactatattgataactatttgccacccgtagatgcggcaacgctcgaaatgaaaaaggcaggtagcggtcaagtaaacgattattggacagccactttaacagcaccgtatcaccgaatcaagtatacttttgaagttattggtaatgatggtagccatattatttttggtgatcgtagtattgaaaaatttagtgatgagaaattaagagaagatggcttatattttaaagtgccatattttcatgatattgatcgtattaaaactcctgcttggctcaaagatgttgtctggtatcaaatctttccagagcgctttgctaatggagataaaagtaatgatccagttaacgttaagccctggaatccagaagatcatcccggcagagaagatttttacggcggagacttgcaaggagtattggatcatttagatgatttacaaaggttagggattaccggcttgtatttctgccctatttttaaagcaagctctaatcacaaatatgacaccattgattatttacaagttgatccagcttttggcgataaagatttatttgcaaaagtagtgaatgaagctcacaagcgcgggatgaaagtaatgttagatgcagttttcaaccatcttggtgaccaatcaatgcagtggcaagacgtggttaaaaatggagccaaatcccgctttaaagattggtttcatattaattcttatcctgttgaaccttatcgtgatccaagtaagggagaaaagaatccgccttatgaaacctttgcttttgaaaagcatatgcccaaattaaatactgctaatccagaagtacaggatttcttattggaaattgcaacttattgggtaaaatattttgatattgatgcttggcgcttagatgtagcaaatgaagttgaccaccacttttggaagagattccacgacgaattaattaaaattaagccagatttctatattgttggagaaatatggcattcagctcgtccgtggcttcaaggagatcaatttacaggtgtaatgaactatccgtatactttgcaaattgaggatcatttttttaagcataagttagatggcaaggaacttagcgaacacttaactgatcaattaatgatgtatccagatattgttaaccaagcgatgatgaatatgcttgattcgcatgatacagctcgaattttgactttagcaaacggtaatcaagatttagctttacaagctatagcttatgagttcgttcaacctgggataccatgtatttattatggaacagaaatggggatgagcggcgataacgatcctgattgtcgtaagccaatggattggggtaagttaaatggcccagtctggaagagggttcatgaattggttaaattccgtttagaccatcaggatactttaaatcaaggcgatgtgaagttaacggtaacagaaaatgatctactaaaagttgaacgaacaggaaaagaaacaataaatgcctactataataccagtgatcatgatatcaaaattgataaaaaaccatcgcttagtcaaaattatgaagatggtattttggcgccagatggctttttggtagaagtaaaagcttaaatttatgataagaaaaagcagcgataagaagctgctttttttcttataattttttgataccggtaacatgaaaataatcattgtgaagcgcttccaatcaatggataatagacttgtaaacaaaaaacctcacagaagtgatggagaatgatgatgaagagaatttttgaagttgatccttggaaagtaacaacgcatgaattttctaaggaagataaaagattacaagaaagtattaccgcaattggtaatgattatatgggaatgagaggaaactttgaagaaggctattctggcgatactcttcaaggtacctatttagcaggtgtttggttcccagataaaactgttgttggttggtggaagaatggttatccaaaatactttggtaagactcctaatgcaccaagcttcatcggaattggaattactgttaatggtgaaaagcttgatttagcaaaagttaaatttagtgattttgagttatcacttgatatgcatcaaggccttctctcaagaagttttatctatgaaggaaaagatgtcaaagttaagtttgaatttgaacgttttcttcatattattcaaaaagaagcagctctaattaaagttaaagcaactgtacttgaaggacatgcaaaaattgattttgattcaactttagatggaacagttgttaacgaagatagtaattatgatgaacgtttctggatcccacttggtgaagataaggatagaagaactatccaagtaaaaactaagccaaatccatatgaagttccccaatttacggttttacttaagcaagcattacgtcataacgggaaagcacttcaaggtgaagtaacaactgacgaagctaagttaagtgaaaagctttcggttgaattagatcaaggtcaaagttatgagcttgaaaaagacgttattgttgtgacaagtcgtgacattgaagagaaagatcaagctgatgttgctgaagacttcatgaaaaagctgcaaactaagagctttgaagagaacttagctgagcatacagctacttggaaaaagcgctgggaaacaagtgatgttgaaattgatggggatgcagctgctcaacaaggtatccgtttcaatattcttcaattgtttatgacttactatggtgaagatgaaagattaaatgtcggtcccaaaggatttaccggtgaaaaatatggcggtgctacttattgggacacagaagcatttattgttccaatgtacttagctattactaagccaagtgttactaaagcattgcttcaatatcgtcataatcaattaccaggcgcttatcacaatgctaaagaacaaggcctcccaggtgcgttattcccaatggttacttttaatggtattgaatgccacaacgaatgggaaattacttttgaagaaatccaccgaaatgctgatattccacatgcaattgcaatgtacaccgaatatactggcgacgatagctatgttaaaaacgaaggcatggatgtcttagttggaactgcaagattctgggcagctagagttcattggtctaaatggcgtaataaatatgtaatgcatggtgttactggaccaaatgagtacgaaaataatgttaacaataactggttcactagtactatggcaagatggcttttgaaatatactttagagcgtttgccgcttgcaactaaagaagctcaagaaagagtccatgtcactgaggaagaaaaagaaaagtggcaagacattgttgataagatttatcttccagaagataaagatttgggtattttcttacaacaagatgacttccttgataaagaaattcgcccagtaagcgaaattgaagatcaaagaccaattaatcagcactggtcatgggataagattttaagatcgccatttatcaagcaagcagatgtattacaaggaatctacttcttcccagaaaattacactaaagaacaaaaggagaagaactttgatttttatgaaccactaactgttcatgaaagttcattatctccttcaattcactcagttttggcagctgaactagggaagaaagataaggctgttgagctttatgaaagaactgcaaggcttgacttagataattacaacaacgatacggttgacggtttgcacattacttcaatgagtggttcatggctagcaatcgtgcaaggtttcgcaggcatgcgttatgatcacgatcaattaaaatttaagccatttatcccagataattggaatcattacagcttcaagattaattatcgcggtcgcttgattgaagtttatgtcgatcatcaagaaactaagatttcactactcaaaggtgaagatctcgagattttagttaatgatcaaaaagttatgctaaaagaaggtgaaactgaatgcttaaaggcttaatttttgacttagatggagttttaactaactcagctgtttaccacttgactgcttggaataatttggctaaagaattaggaattaacctaacagacgaacagcttgatagtttaagaggtatttcaagaatggattcattaaatttgatcttgaaatacggtggtcaagaaaataaatattctgaagcagaaaaagaaaaatttgctgcagaaaagaatactaagtttgttgaacaagttgaaaagatgacgccagcagatattttaccgggcattcctgaattacttagtgatgcaaagaagcaaaatttaaagatggttattgcttctgcctcaaaaaacgcacctaagatcttaactaaattaggaattatggatgagtttgatggcattgttgatccagctactcttcatcgaggaaaaccagatccagaaatttatgaaaaagcacaaaaattactgggtttaaatgcaaatgaagttattagctttgaagatgctcaagctggtgttcaatcaattaagagtgctggacaatttgcagtagggattggagataaagaagtcttaaaagaggctgattatattgtcccaactactaaagaattaaaactttcagaaattgaatcagtttttaataaaaaataagagggaagtagggaaagagaatggttgaagtagatttaaaccatatctataaaaagtacgaaggaaatgataaatattcagttaatgactttgatttacacatcaaagacaaggaatttatcgtttttgttgggccatctggttgtggtaagtcaactactttaagaatggttgctggtctggaagatatttctaagggtactttagaaattgaccataaagtaatgaacgatgttgctcctaaagatagaaacatcgccatggtattccagaactatgctttataccctcacatgtcaatttacgacaacatggcttttggattgaaacttcggcactacaagaaagatgaaatcgataaacgggttaaacatgctgctgaaattttaggcttgtctgaataccttgataaaaagccatcagaactatctggtggtcaaagacagcgtgttgccttagggcgtgcaattgttcgagatgcaccaatcttcttgatggacgaacctttatcaaacctagatgcaaaattacgtgtcacaatgcgtgctgaaattgctaaattacaccaaaacttaggaactactactatctatgttactcacgatcaaactgaagccatgactttagctgaccgagtagttgttatgtcagttggtcaagttcagcagatcggaacgccacttgaagtttataacaagcctgtaaatatgtttgttgctggttttattggttctccgcaaatgaacttcttcaatgttcactttaaaggtaatcgaattagtgatggcaaaggattaaatatcgaaattcctgagggtaaggctaagatgcttaaagataagggatatgaagataaagacttagtctttggtattcgtccagaagacattcactcagaagaagccttccttgaaacttggccaaatcaaactgttaaatctacagttgtcgtttctgagttgctgggatcaacgattcaactttatcaaaaagtagacggcacagaatttgtagctatcgtaaatgcccgtgattaccatactccaggcgataaggtagaaatgggatttgacgttaacaaagctcacttctttgataaagatacaacgaatgcaattcgttaacttgcagaagaggacgcttctgcaaatattaattaagcttacaacgagtgtgaaacttggttcacggttgtaataatgtgtttagccttttatggctaggaggaaatatcatgaagttatggaaaaaattggctttaggtagtgtcgtagctttatcagctatttcattaactgcctgtggtaagagttctaattcaaacgaatcaaagagctcagataaacaactaaccctttgggtagatacagctcgtgttagttggtacaagggtgttgtaaaagactttgaaaaagaacaccctaacattaaagttaaggttacccaaaaccctaatggttctgctaatgctaagactgacgttggtaaggacccttcaaaggccgcagatgtttttggtgttccaaacgaccaattaggtcaaatggcagattcaggttatattaacccactttcaccatctgatactaaggaaattaagaagaactcagttccagaagcatataagggtgctgaatggaaaggtaagctttacgcatatccatatgcagaacaagctcaaaccgtttactacgacaagtctaagctttctccagaagatgttaaatcttggaagaccatgacttctaaaggtgtagttgcaaccgactttactaatgcttacgtaatgtggccagtaatgttctcagcaggcactaagctatttggtgatagcggagaagaagtaaaaggttccacatttgactcacaaaatggtgtcaacgcaatgaaatggtatgcagaacaaaagaacaacaagggtgttatgcaaacctctaacgcacttaaccaattaaagaagggtcacgctcaagctatcttagatggtccatggaatgcagcaaacattaagaagatcttaggtaagaacttaggtgttgctccatatccaactattgaacttggtggcaagactgctcaaatggaagctttcttaggtattgaatgtttcgcagttaactctcatacttctaacgctaagaatgctgcaattttggctaaatacttatcaaacaaggaaaaccaattaattgttcacaagaatgctggtgaaattcctgtaaacaaggcagctcaaaatactgcagaagttaagaatgacccagtagctaaggctgtaattcaaatggcacaaccaggttactcagttcttcaaccaaaattgccacaaatgtcaatcttctggaacgactcagctccattaattagtggtgcatacgacggcaagattaagccatcacaatacaagactaagcttgctaaattacaaaagagtatttctaagaaagaataatcttgaaaaatcacataagcaaaggtttgattaattatgtttaagaaaaaacatgctacgcctgcggttaccttaaaggaaacgtggaaagatggagataccgtaaccaaattaacattcttcatcatgggtttaaatgctattaagcatcggcaatggctaaaaggattttcgcttttattttccgaaattatatttttaatttggttctttttaagtggaattcattcaattgctggcttgagtaatttaggtgcaataaaaaccaaacgagttgtgtttgataaagcacagggagtatatgttactcaacaaccagataattcagttttgatcttattatttggtattttagctttattcatcgttgctggaattatttacttatatatcattaatctgaaatctaataagcatactttcttattagaaaagagacatgaacatattccaactaaccgtgaagagattgcatctttgtttgaccaaagattacatgcaaccttgatgacaattccaatcgttttaattatcttgtttactgttttgccaactgtcttcatgatttcgatggccttcactaactatgatcgtcaacactcaatcggattttcatggactggttttcaagcatttggaaacgtgttaggaggagacttagctggtactttcttcccagttctaggttggactttgatttgggcagtggcagctactgctactactttcttctttggagtcttgcttgcacttttgattgaatcaaagggaatcaagcacaagaacttatggagaacaatctttgtaattgtttatgctgtaccacaattcgtttctctattaatgatggcacaattcctagattatcaaggaccattaaatacattgcttatgaactggggctggattagccacccaattcacttcattgataatcaggctagtccacttgtcgcaagaattacagttattgtggttaacatgtggattggtatcccagtttcaatgttaacttcaactgctattattcaaaacttacctcaagaccaaattgaagctgcacgtattgatggtgcaagcccagtacaaatttttaatcacattacattcccacaaattctctttgtaatgtctccagctttgattcagcaatttattggtaacatcaacaacttcaatgttatctacttactgactggtggtgcgccactgaacaataactacaacggcgctggttcgactgacttgctagtaacttggctatataacttaacatttggtcaagagcaacgctacaatgcgtcagctgtcttaggtatcttgatctttatcattagtgccacattttcactaattgcatatcgtcatactaatgcgtacaaggagggctaaaaatgaagtcttatcataatcaaagaaagattgctttaatctttagatatgttctattagccatcttggccgttttatggatattcccaattatttggattattttagctagtttttcatacaacaacacaggattcatatctactatttggccagataagtttacttggcaaaactatattggtatttttactaactcacagtatccatttgttaactgggtattaaatacattgtttgtcgctgttatctcagcaacattatcaacttttgttacaattgcggttgcttatgtattatcaagattacgtttccgcttccgtaaacccttcttacaaattgccttagttttagggatgttcccaggtttcatgtcaatgattgctttgtactacatcttaaaggctttgaacatgttaaaccttggtggcttgatcttagtttacgttggtggtgcaggattaggtttctacattgctaaaggattctttgacacaatgccacgtgcaattgatgaagctgctgaaattgatggtgcgactaagtggcaagtatttattcatattggattgccgctttcaaaaccaatgattgtttatactgcacttacttcattcatggctccatgggtagacttcattttctcaggtattatcctctctacttctggaaatccgaagacctacacggttgcctatggtttgtacaacatggtccactcttcaaagggtatgatggctcaattctttactcaattcattgctggttgtgtggttatcgctattccaattacaattttgttcattgtaatgcagaagttctacgttaacggaattacagcaggtgctgataagggttaatcaaattaaagtttatgtgaaaaaagtgttctgcgtttgcaggacactttttatttaaaggagaaaatttatgacaccatggtggaaaaaagcagttatttaccaaatttatcctaagtcatttcaagatagtaatggagacggaattggggatattcctgggattatctcaagacttgaatatttagaaaaattaggaattgatgcaatttggttgtcgcccgtttatttatctcctgggatcgataatgggtatgatatttctgattatcaaaaaattgacccacaatacgggacaatgaaagatatggataatctaattaaagaggctaaaaaacatcatatacggatcgttatggaccttgtcgtaaaccatacttctgatcaacatccttggtttgttgaagcaaaaaagagccaagacaatccatatcgtgatttttatatttggcgtgatccagtagatggacatgaaccaaatgatttaaagtctgctttttcaggctcagcttggaaatttgacgaaaaaacaggacaatactatttgcacttttttgcggatcaacagccagacttgaattggaagaatccagaactaagaaataaagtttatgacatgatgaattactggattgataaggggattagtggctttagaatggatgtaatcgagttgattggtaaggatcccgatcaaaaaatccgtgaaaatggtcccatgcttcacccttatttaaaagaaatgaatgaacatacctttgctaataaagatatgatgactgtaggtgagacttggaatgcaacgcctaaaattgcagaagaatattctgatccagcgcgtcatgaattgtcgatggtctttcaatttgaaaaccaagctttagatcaagaaccaggaaaagaaaagtgggatgtaaggccgcttgatttaggagaattgaaaaaggtcttaattaagtggcaaacagagattgattttaaccatgcctggaatagccttttctgggaaaaccatgatatcccacgtgttatttcacgttggggaaacgatcaagagtaccgcgttcaatgcgctaaaatgtttgcgataattttgcacttaatgcgtggaactccttatatttataatggtgaagaaattgggatgactaactgtcctgttaagtctattgatgaggtcgaagatattgaaagtatcaatatgtatcatgaaaggctagagcaggggtataagagagctgatctgattaattcaattaacgttaaaggccgcgataatgcaagacgaccaatgcagtggtctaatgaagagaatgctggatttactagtggaaacccctggttgaaagtaaatccaaattatcaaaagattaatgttaaagctgctttagcagatctagattctattttctatacttatcaaaaactgattaagcttagacatgaaaatcctgttgtagttgatggagattttgaattagttgaaaatactggtgatagtgttttagcattttggcgtaaactaggaagtgaaaagtggcttattgttgctaatctatctggtgatagacaaaggtttaacttagataatgatttcaaagaagttttgattagtaattatgaaaagcaagatagtttaaagaatattattctaaagccatatgaagcttttgcagttaaggcataaagaaaaagtacattgatttctgcaatcaatgtactttatttcatagttatttctttttatttggacgtcttaagtaacgcaatgtgttgtttctaatatatttctgaaattcttgataaattggatcaaaaatttgtggctcatcagtttctttaaccattactttaggaaagaagaaacgttcatctccctgaagcgtaccatttaaagatttaacgaggggacttaactcggatagttcgactaagctaccatcagcttgcatgatttcaatcggactgtgggcatttttaccaataggcttataagcatcatatggctcatcaaatgccgaattagtggcagtgtagtagttaggatcaaaacctgcttgtttaattaaattctttaattttggtagtaaactcttagtatcttcattaatcttgacactttcaaggggatgacgatataagtaacgacttgaaaggtctgatagaatttgatcgcctgaattagtccataataagaaattagtttccattacgccgtcgtctaaattaagataatcttcaagtgtccaatttccttttagaaaggcctctagttgtggagtaacttggagcttacctgcttcatatataatctgcgctctttcaagtaagtgatgcaggatgacttccattgaacgatttacgcggtgaaaataaacttgttgatacatctggtagcggctaataatatagtcttcaacagcgtggatgcccttatcagtaaagcaaattccatcacggtacggacgaatcacttctaagattctggttaaatcaaaactaccataagttaccccagtaaagtaagcatcacgaagtaagtaatccattctgtcagcatctgcttgactagaaattaattttacaacttgtgggttagagtaagtcttagcaattacgctagctactaattctggaaaattgggactaacttgtcttaaagcttggtttacttcagtacttttatcggtaataatttgttgacccattttttcatggttagtaccaaagagatgctcaaaggtatgagagtatggaccatgaccaatatcatgaagcaaggcagcacattctgctaaaagacgttcgttaggatcccataatccatcgccgggttctttactagtatatttttcttcaaaaatatcgcagattcggcgtgttaattcataaacacccaagttatgttcaaagcgggtatgtgttgctccttgaaaaacataggaagcaggtcctaactgtttaatacggcgcaagcgttgaaattcttttgaattaataatatctagaatgactttatctttaacatgaatataattgtggactggatcacgcaatactttttcatgatctagctttttactttgaaatttttccatttttcttatactattttctcggataataaaataatcggttaactcttaattaacttgattataacaataatgctactgtaaggctatcttagcacggatgaaggtgaaaataatgaacaaagaagttgagataaagattaccagtgaaattcatcaagaagatgattcagcagtttttgaaagagaaggcttgggaagcctcgaaaaaattggtaataattggcgattaaagtataacgaaaaaaataaggcaggcgacgttgaggttaaactattaattaagcccaatgaattagtaatgcaacgaggagatattaaaggcgatcatacattaatgaaatttgaaccaggagagaaacaagaatgcaaagttatggctgctggtaagcaaatggatttagtatctttgaccaataaattagatttttcaaaaatttctcccggaaagatgcaacttaaagttgaatatgatctcttttctggtctatacttagtaggtaactatgcaataaagattgaagtaacagatctttagcaaatttagataaattgattacgtgaaaggacgtgccactgtggggttagatgattttaaaggccaaaataaagacgaattgtcaatgatcgaagttgctcgtgcaattttacaagatagcggcaagcgaatggcctttgctgatatcgttaacgccgtccagaactttctgggtaagagtgacgaagaaattcgtgagcgtttgccacaattttacactgatatgaacactgatggtgaattcatttcaatgggtgataatgtttgggcattgcgttcttggttcccatatgaatctgttgatgaagaagtaaaccatccagaagatgaagatgatgtgccacgtaagaagcaccacaagaaggttaacgcctttattggtgattctgacgatgacgacattattgactacgattcagatgatccagaagatgaagatttggacgttgatgacgacgacaataatgaagatgattactcagatgatgatcttgacgatgctgacgacaatgaattagatgatggtatcgaaggacaattatcagaacttcaccaagatgatcttgatgatgatgacgattaaagtacttgacgggaagagaatttccctttagtattttgtatgggcactctatgtgcatttaagctcccatgaacttgggagctttttttgattttaacgaagaataaaagaaaagagaggaagcacggcatgacaaagtatatttttgtaactggtggggttgtttcatcattaggtaaaggtatttcagcctcaagtttaggacgtttacttaagaatcgtggcttaaaggttaccatgcaaaagttcgatccttacattaacattgacccaggtacaatgaatccatatcaacacggtgaagtttatgttactgatgatggtacggaagctgaccttgatttaggtcactacgaaagaattgttgatgttagaacaagtaaatattctaacgtgactacaggtaagatttaccaagaagtacttgataaagaacgtcgcggtgactatcatggtgcaactgttcaagtgattccacatatcactgatatgattaagaaaaagatcatgcgtgctgccttgacgactgattcagatgtaattatttctgaaattggtggtacagtaggtgatattgaatcaactccatttatggaagcaattcgtcaaatgcgtcgtgaagttggtgaagaaaatgtaatgtacatccactgtactttagtaccttatcttcatgcagctcatgaaatgaagactaagccaacgcaacattcagttgctgaacttagaagcattggtattcaacctaatatgcttgttttaagagcagaaaaaccagtacctcaagatttaaagaataagatttcaacttttactgatgttccagtagatcgaattattgagtctattgatgctccttcactttttgatttaccacttgcctttcaagcacaagggatggaccaaaaggtctgtgatttcttacacttagaaagtccaaagccagaagcagatatggaagcttggaagaagcttgatgagcgtgcaaagaatttgaagcacgaaactactattactttagtaggtaagtatgtagagcttgaagatgcatacatttcagttactgatgcattacaacacgcaggctacttatacgataccaagattaaagttaataaagttcaagcagaagatatcactgaagataatattgctgaaatcatgaaaggctcggacggcttaattgtacctggtggttttggtacacgtggtcttgaaggaatgattacttcaattaagtacgctcgtgaacatgacattcctttcttaggtatttgtttaggtatgcaaatggcaagtgtcgaatttgctagagatgtacttggattaaaagatgcaaatagtgcagaagctgatccagaaactaagaataatatcattgatatcatggctgacaagcgtgacgaagaaaatatcggtggtactcttcgtttaggtttatacccagcaaccttaaagaagggtactaagactcgtgcagcttacgatgatcaagatgttattcaagagagacaccgtcaccgttacgaatttaacaatgattatcgtgaagcctttgaaaaggctggcatggtcttctccggcgtttctccagataaccacttagtagaaattattgaaattccagataagaagttcttcattgcagctcaatatcatccagaatttttaagtcgtccgcaaagaccagaaggtttattcaaggcctttattggtgcagctagtggtcttccagcacaacattttaattaggcttttcaaaaattaaatttcggtaacaagagggccataatatacgggttctcttgttttttttgcgtttttcatttaatatattttgtgatacatttgggtattacaaatagagaaaaggattgtttccccaatgaaacagatgattattcatggtggaaagcccctgaagggcgacgtatggattggcggtgctaagaattctactgtagcactgattccagcgtcaatactttcgcggactcctgttaccctagaaggggttccgcggattgctgatgtagataatttgatggatctgcttagtgaaatggatgtgaagtgtgattttcatgagacgactttacggataaatcctgatgacattaagcgtagtccccttccagcaggtaaaattaagagtttaagagcttcttactactttatgggtgcattattagggcgttttggtaaagctgtggtgggctttccaggcggtgatgatattggccctcgtcctattgatcaacacattaagggttttgaggcattaggcgcaactgttgaaaatgagaacgatcagattattatcacagcgcctaagactgggcttcgtggtgcaaaaattcatttaaagatgccgtctgtcggcgcaacaatgaatataattatggctagtgtgatggctaaaggacaaactattattgaaaatgcggctaaagaaccagaaattattgatttagcgacatttttaaataatatgggagccgttattcgtggtgctggtactgatgtaattagaattgaaggagtagaagagttgaaggctcaaactccgcatacaattatccctgatcgaattgaagctggaacttatgtggctttagctgcatgcattggtgacggaattagaattcataatattattgaagaacaccttgattcatacttagcgaaagtagaagaaatgggtgtagtaattgatgctgatgaagattcactttatgtgtatccagcaggtgacttaaagatggttcaagttaaaactgacgtctatccaggctttgcaactgacttgcagcaaccaattaccccacttcttttaacagctaagactggtgaaggtgtagtaattgatcggatctatcctaagcgagtagggcatattcctgaacttcagaaaatgggtgcgaatatccaggtagaagataatattatcttggttcatccaactcatcatttgcatggtgcacatgtcagcgccggtgaaattagagcaggggcatgcttgatgctggctggtttaatggctgatggtgagactattatttcaaacgcaggtaatattttgcgtggttatgatagaattgagcaaaagttgcgtcaattaggtgcagaagtatctgtaattgatgtttaagatttttgaataaagtaaaaaggacttggaaaaaactccaagtcctttttatgtggttttaagaataatttttaattagtgttgtacctcaattttttctggtgcagcagggatatgctgctcttctaacccagattttcctttaaagaggagattgaggatagtagcacttaagctagctacaacaataccatttccaaggaataactgaatagtttcaggtagagattggaaaacttgcggataaacagtaacacctaatcctaaaccaattgaaatggctacgattaagatgttgcgagtatcgtcgaaatcaactcgcttgagcatccgcattccttggacggcgatcatagtgaacattactagcattgcaccgcccaagacagaatcaggaatgatagttactaacgcaccaaattttggtaataatcccattaacattaaaaatccagatgcccagtaaattggtcgtttagtggtgatgcctgacaattcaagtaaaccaacattttgtgaaaaagtagtgtatgggaaagtgttgaagacaccaccaagaatttgagctaatccttcagcacggtagcccttcttgagatcatcacttgaaatatctttatgtagcaagtcaccaatggcaaagaaaacaccagttgattcaaccattgaaactagtgcaatgataatcatggttaagctagatgaccactcaaattgcggcatcccaaaataaaatggttgtggcaggtggaaccaagaagcttgtgcgactggggttagtgataccattcctagcgtgcttgcaattagtgtcccagcaattaagccaactaaaacggcaattgatttaataaagcccctaccccaaacctgtaatgctaggataattgcgacagttataaaaccagttaagagatttttaggatcaccaaagttcttagcagcagaatttccaccaccaagattttgaatagaaactggaattaaagaaagtccgataactgtgattaaacttcctgttacaactggcggaaagagttttttgatttttgaaaaataccctgctacgaggaagacgaagatacctgcgacaataatagcgccatacatcgttccgatagtgaattttttaccaatcatttgaagtggagcgactgcttgaattgcacatcctaaaacaactggcaaaccaattccgaagtaacgattacgtaagagttgaagtgcagtggctaaaccacacataaaaatatcaattgaaactaggtaagtcatttgtgtggagttaaattttaaggctgtaccaattaagagcggaacagcgatagctccagagtacattgctaataaatgttgcaatcctaataaagctgcttttttgtggttaacttgcatatgcttcatttatttttctcctacaaaatgtacttgattattttcaaaattagaaattctagctaaggcttcaagacgatagccatgttccttaacccagtcgctgccaccttggaactctttagctaccactacgccgacacctgctacagctgcatttgcttgtttggcgatattaagcattcccttaacggcttcaccatgtgctaagaaatcatcaataattaataaatgatcgtcactgcttaaaaatttcttttctacgcaaattttattattaaccttttttgtataggaaaatacatcggcccagtaaacagcgtcgttgagagtggatggctttttctttcttgcgaaaaccattggaacgcctagttgataagctgccataataccaggtgcaattcctgaagcttcacaggtaagaactttagtgatcttttcattttcaaataaacgtttgaattcttcccctacttgcatcataagttccggatcgacttgatgattaagaaaagaattaatctttaagacgtcaccatctaatacttctccatctttgcgaatccgttcctcaagtaatttcaatttgttcctcctgcataaaaaagactccttctacccgtgaattagggtaaaagaagtctattgtagtgctacttatgacatcgattacctatagtccagaattaattggttccgggtagaaactgtcgaccttattacgacgatatatagatattttgatatctagagtgtagcagaatcattttccgaacacaagggcctttttagggatggatcattctgaaattgcttttttcttttttagcgacacgaccgtttcaaagattccgtacgcaattccagctagcggccaaataatccagctctggctccaattgttactcataaaactataagcaagatagataaaagaaattaccatccagtaaatggttgcgtatttttcaatcaactttttaccagcttttttctcacttgtgtagtcatcaagttgtaggataatattgaaactatcatgaatgatattagttttaactaagaaaaagacgccaatgccaacgagtaaaagcgtaactgaagaaaggccagtcattaagtcatcaagtctactgctagcaagtgcatctacaaataaggcgccactcattaacggaatagcagacaaaatgcaaaaagtaatgccaataattttaaaaatcatatgttggttttcatagactttattttctttgataattttttctcttaatttgtttgaaagattgcagtcttcatattcgtaattttcatgaactttaagccatcggtttccagctatgaataacgcaactgctgcggcgataaaagctagtaaaacaattactccaattccagttgcaaaattgattgaccaggttaagatgtctaatctagtaagactaattagaattaataagacaattggtgagaaaatacatagcattacgccactagcaattaatgtagaactgcgtcttctggcagataagaaatcttgggtagcagaataagatatataattttcgttagacatgataatcacctctttaatatataaatagaagtttgtatagactatctatattttatcgatcaagaaatgaatacgctattttaatgcttagggatagaaagataaaagaaatgattgaccaattgaatttttcttagtaaagtttctagtaaatagggatgaattattttagaaggagaaaattgtggctaagactaatctaaatgactttgacaagattatcgtgcttgattttggtagtcaatataaccaactgattacccgtcgaattcgtgattttggtatttattcagaacttttgcctcatgacttgagcattgaaaaaattaagaaaatggcacctaaaggaattatcttttcaggtggtcctaacagtgtttatgatgaaggcgcattaaaggttgatcctgaaatctttaagctaggtattccaattctgggtatttgctacgggatgcagctgatgagttacgacttaggtggcaaggtagaaaaggctgataattcagaatatggccgtgcagatatcgaagtaactgatccaaatgcggtcttgtttgaaggcttacctaaagagcaatatgtatggatgagccacggagatctagtaactaaggcaccagaaggctttaaagttactgctaagagtaagaattgcccaatttctgcaattgctaatgatgaaaagaaattctatggaattcaattccatgcggaagttcgcaattcagaatatggcttagatattttgaagaactttgcattcaatgtttgtgatgcaaaggctaactggacaatggacgatttcattgaaatgcaagttgatgaaattcgtgaaaaagtcggtgataagaaagtcatcttaggcctttcaggtggtgttgattcaagcgttacagcaacacttttgcacaaggcaattggcgatcaattgactgcaatttttgttgatcatgggatgcttcgtaaggacgaaggcgaccaagtaatgcaggccttgaacaaggatcttggtgtaaacattattcgtgttaatgcacaaaagcgctttttagataaacttaagggcgtaaccgaccctgagcaaaaacgtaagatcattggtaaggagtttattgaagtctttaatgaagaagctaagaagcttaaggatgttgatttcttagctcaaggtacgttatatactgatgtgattgaatcaggtactaatactgctcaaacaattaagtctcaccacaatgttggtggcttacctgaggatatgcattttgagttaattgaaccacttcgtaagcttttcaaggatgaagtacgtgaactgggtgaaaaattgggtattccacacgacttagtatggcgtcaaccattcccaggtccaggtcttgctattcgtgtattaggtgaagttaccgaagataaacttaagattgtgcgtgaaagtgacgcaattttacgtgatgaaattaaaaaggctggcctgcaagaagatatttggcaatatttcacagtacttcctggtattcgctcagttggtgttatgggtgatggacgtacttacgactacaccattggtattcgtgctgtaacttcaattgatgggatgactgcagactttgctaaattgccatgggatgtattaagcaagatttctacaagaattgtagatgaatgtgatcatattaaccgtgtagtttatgatattactagtaagccaccttccactattgagtgggaataatagaatatataagtaaagctcgcaattagatttgcgggctttattttgaaaaaatatgctataatcaagcatgaaaaaaggagatccgaagatctccttacagcccgctttaagagcggaggtaattatagtattgtgaatacgtcactcaataactgtccaaagttatataattgagcggcgtttttattttttgtggtggtcgatgtatgtcagcagagctaacaagaacgtaccaaacaaaagcatcaaagaaatgctctcgtaaaccgacatggttgaaccttttctgcagtatattgaccataggcttcacctccgggaggaaaaacaaccgtcgctcataaaactttctgcaaaaattagtatagcgaaaatttgttcgtaaagaaagacggacaaaccaaaagctcgcaattaaatctgcgggctttttaatgaatatcatcgcctggtgttgatactattcttatttatggtataactagtttataaaattttggaggatttgattaaatgaatttcaaaaaacaattattttttggggcaattgcactccttactgtcggtttaacaggttgtgcaaataatacttcttctaatagttctaacaatcaagctacgtctagtaaatcaagtaaaactaatcaaagttcaagccatgagttaactatcactgatatagttggaacatatgtaaataaagataaaacagccgcagttgtgttacaaaatggacatacgttatggtattaccaaactaagaaccataatgatggttcaaaaaatgattctggtaattggcattacgaaggtcacaataaattctcaattacgctaacgcatagagatgataataatcaagaggttaatactaatgctaacttgttgttagaagggaaaaaactgacgatgactgagaagaatggtcagaataaacaggtcttcactaagacaagtaatgaggctaaagaatatgatgagatctttaatcctggtaaaaaagtagactcggatgatccatcaaatagcgcaaataaagatgatcaaagttcaaataattaattttctggttaataaatgaaaaagctcgcaatttattttgcgggctttttaggtgaattattcagctttttctttgataaaaaagtatgtaaatagacagtaaactgtaatacttaaatatacgaaaagtgtaggattaaaaaagggtatatacaaaccataaggaagtctagtagtaatataaaaaatacccaggacacagaaaacataaatccaactgccatagacaaacaatctgtgaagcttaattggcaaatgctttttatgcttaattagagtagaaagataatttctttggaataaatagaaattaaaaaagtataaagcaacgctaaaaattgaaagagatattcctcgggtaataagtggctcaatgccagatagaagcgatgtgctttccattattggacctataatgcttaaaactgctagaatactagccaaaacaagatatttatcattatttttatgaaatgtcttagttgtagcttctagttttttcttttcttctctgacatcgaaattttgctttttaagttgtttgaactcgcgtacattcattatgctgtaaacgaataagcctactgcaattgctatagttataataaacaaaatatagccaatagtagaaactattgaggttaagcgatcaccatatttttctaagaaatattttgtgtctaaactataccttaatgcacgtgtgaagcaaatacatgctaaaccaaaaataattaaggcaatagctaacgcacgaaactttgcattttttcgactagcagttaaatattttctaactagttcatcagataaaacaggtaatttatctttatcattaatatcttcgtttttaaactcaaatgagggttcgccgctctttaatagatagtcagttgttacaccaaataattctgataaattaactattttttcaatatctggaattgattgttcactttcccattttgaaactgcttggcgactaacgttcattttttcagctaagccttcttgagaaagattattctttttccgcaagtctgcgattttttgacctaatctcataatagatcgtcctttctgtttttattgatcttaatttataaaaaatcttggttgcagacaaccactttttgattgcttagcaggcaactattagttgcaaatacctttttataggctaaatgatgctacatgtatctacaaagtgataaaatgtaatcacacaaaataagtgggaggtaatcttatggattttttgaaggataataaaacagccaaagtttttaaagcaggaaattcagaagcaattaggttaactaagcaagatactgctatctttaaagttaagcctggagatcaggtaatcaaagaggtttctccagatgggatgtcaattacgtttaaaaaaatgcctgaagtatcagaggatgtaaagaaagaagttagtgatatcttaaatgaagatgcagatttaattcaagcgttaaaggatttataaaatggaatatagatatttatcttctagcgatttgatatatgttaacaaaagagttctagaatttaccggcgaaaagcaagaagttattcaataccccgaaggattaagtgtaattattgaacagccacaaatggttctttttggacatgaattatatccaagtttatggttaaaagctgcctttgttttgcaaaaaagtactaaaaaacatatttttacggatggaaataagagaacagcatatgtggtaacaaaattatttttaaaattaaatggatatagtttaaaagtatcaaaatctcaagggatcgcattaatgctgagtgtaactacaagtgcagattcagaagaaataatgcaaaaagtagcaatatttttgcagaagaatagtgtaaggatcaataagtaaatatttaactgagcagttgaagaagatagcaaaaagcaactgtcaatgaaatattttttgtaaaagaagacaaataagtcaaaaagctcgcaattaactttgcgcgcttttattttgaaaaatatggtataatttgtgtaaagaaaaaggagatccgaagatctccttgcagcccgctttaagagcggtggtcgatattataaaaatcgttgaaaacgacgctctataactcgccaaagttatgtaagtagagcggcgtttttattttttgtggtggtcgatataggttagcaaagctaacacgaacgtaccaaacaaaagcattaaggaaatactttcgtaaaccgacatggttgaaccctttctgcagtatattgaccataggcctcacctccgggaggaaaaacaaccgccgctcataaaacttgctgtaaaaacattatatcgaatacttgtttgcaatagaaggcgaacaagtcaaaaagctcgcaattaattttgcgggttttttaatttttctttactttattaggataacggtgttatcatttgagtcaaagataacactgttatctaggaggcgggtatgaatacacaagataagttagttggtaagactattactgtcatagacaaatatgggtatcaaaatttaagtttaagaaagttaacagctacacttggattaactacaggtgctttttataagcattttaaaagtaaagatgccttatatgaaaaagtagcaattgaactatcacgtaattttattgataagatatctttacctgataatgcgacagctcaagagaaattactaataattgctaaaaacttttgtcagtatgtagatcaacataataatttagctgaatttttgttttttaattcaactactttaaaagtattttctactaaaaaatcaaaatatgattttttagataaaatgaaagttttagttaatgaactaaatccaaaaaagaatgtatcaaatcaagatctatttattcaaatatggtcatttattcaaggatatgctgctttagttaataagaaaatagtcgaatacgacgaggatttagtgaaaaggacactagatgagtttttacagtagaaaagagaatattttatggattgcttgattatttattgtcatccctacgataaaagttttaatcatgctgtactagaaaatgtaggaaataatttaagacaaaataataaggattacaaattaatagatttgtacaaagatggttttgttccaatctatgatctcgaagaaatgcgcttgtttcataccggacagacacatgatcctttagtaaaaaagtatcttagttggttgaaagaaacaccagaagtgatttttattactccattttggtggaatggaattcctggaatgttaaaaggatttattgataaagtcatgaaagaaggacaaggactgtcacatacagttacgaaaactggtatccatggtgaactaactaatgttaaacatacatatgtttttactacttcaacttctccaacattttatttgaaactgtttttaggaaatggtattaaaaaaatttttgttaataagactttaaaacagctggggatgcaagatcgtcattggtacaattttggtggtgtaagtacttcttcagtaggtagacgtaaaaaatatttggataaaattgcaaaaatgaatttataaataatttaagatataattttccctaaggaaagtaaaaacacgattcggttggtagtccgaatgtataattattaactttatatcagtaaccttcctcctaggatgtccatctttcctaataaattttattaggaggaacgcattatgattaaaggtgaattgactatcatttttgatgatccgttttacaaagcaatttttgaacggattgatggtactaattatgaagtagcgcaggttaatttaggagcatccctgccacatatgccagagatacttaagttggtaaactttcattattcgaaattgcatttttatcaaactacggtggagaaagaaaagatttatcatgttaatcctaagagagcacaaagattagctcataaggttactcaaaagaaaattattggtaccaaagcacagcaagctttgaaaaagcagtttgaacagtcaaagatagccaagaaaaaggcaaataaggataggaaacgtaaagaacaagaaaaacgtttcttccaaaaacaagctaaacgtcgagaaaaacatcgtggtcattaatgcaaaaaagctcgcaattgattttgcgggcttttagtttaaaaaatatgctataatctaagtaaagaaaaaggagatccgaggatctcctttgcagcccgctttaagagcggtggttttaaacgttaatttttgcgatgaacgctactcaataactggccaaagttatacattgagcggcgtttttattttttgtggtggtcgatataggttagcaaagctagcacaaacgtaccaaacaaaagcattaaagaatgctttcgtaaaccgacatggttgaaccctttctgcagtgtattgaccataggccttacctccgggagggaaaacaaccgccgctcataaaactttctgcaaagattagtatagcgaaaatttgttcgtgacgaaagacgaacaagataaaaatttaaataaaaaattaaagctcccaacaaaaattgggagttttttgcgtaataaggattagaaacaaaatttttagtagaagaggaaaaatgatgaaatatattaaaaaaatgtttactgatccaaatatgtacaatgaagttgaatttagtaagaagattcatgaagataatgtcttattaaaaataatgcaagaaattcttcctgaagaacgtattgtatcagtcggatttcgttttcccgaagataaggacaatcgaaatatctttgctaaaacttctgatggagaaaccataataattggactgcttgtagctgataaagaaacttggccgagtggcttaaattatttccaaaatatgttaaaagatgaagtttatcgttttatgagaaatgaattgttgctttgtagaacttattttattttgttaacgcctgtagatccatggaaaaatggaagggagaaatatactatttcatttcgaaatgagcaatcagaagaattgactgagatgcttaaatctcggttagttgttgtttgtccagagaattaataactaatagctttgcgtaatttagatatagataggtaaaatagaaaggagaagataatgattttactgatgagaaaaggtgagagaatgttatatccatatgctgaatttccaggaagattaattgttacttatacacaacctttaaaagacaaaaatggtgctgttaaggttgaagttaatttcgagttgcctactgatgatggttttagtgaggcacgttataccttaccagattatagttgtttatataatgacggttttacaccttctgaaaccaagagaaatgaaaaaatattgcataataatgcaaaattgattttagcagctgcacgagagaaagaagagacaaatgcctaattattttacttatgcaggttataaactatatttttggtcaaatgaaggtgatgagccgattcatgttcatgtgactaaaggccaccctaatccagcatctacaaaattttggattttagaggatggtactgtgcaaatggcaaataataaagctgaattgtctaaaaaagatttaaagaaaataacagctttcttggaagctaatattgacgaaatctgcgatacatggaaggattattttagattagataaaatatctttttataaagattaaggtataatactttctatggaaagtaaaaacacaattcggttggtagtccgaatatataatcatatagctttatatcagtaaccttcctcctaggatgtccatctttcctaatattttttaggaggaatgcattatgattaaaggtgtattaactatcgtctttgatgagccgttttacaaggctatttttgagcgaattgatggaaacagttatagcgtagcgcaagttaatttaggtacatcattaccgcgtatgccagaaattatttatttagtgaatcgaaagtattcaaaattgaatttctacagaaccacaattgaaaatcgagcagatcgtcacattaatccaaaaagagctcaacgcttggcgcatacagctacgcaacaaaagcaaattgggactaaggcacaaatagccttaaaaaaacaatttgaagaatcgaaaataattaagaagatgagtgttaaagaaaataaacagcttgaaaaggaaagaaaatttctaaaaaagcaggctaaaaaacgtgaaaaacatcgaggtcattaatgccaaaaagctcgcacctaagtgcgagctttttattatgctgagttatattcttaattattaccatattaatcctataagcgagacgatgatttcactgactagtactaacaaaacattcactaaaattcctttaaacgtactttctttatgaggattattaacgaaggttctagttgaacgataaactagtggaatggtaagtaaagtgcctaaagcaaacgtaggtagatagtgcaatacaatacttaaaactaagcatgacgctaatagttgtagaaacaagggttaatagaataattacatttctagcccattttcgagaaatgttgaatttttctaaaatgttattgtaactagtaacgtgattttttataacgaagagtatattgattgtgaccattgacggctaaatgaaaagaaattacggctaggaaaagccaaaggcaataagagtgcataagaaattaatgttccaacggaaaaacatattttagtaaagccatctgataacttcattaagttagttccaattaattcaaaaaataatagctaaagctaattctaagtaatacaaaataaattcttgcttgatttaattcattttgtattatatcggtgattttttttgatttgtagacttgtaattataaaaactctcgcgaggtttgaattaatgattaatgtgattcttaaattgactaatatcaactccctcgagtctaagcaatttgattttcttatcaattccagcagcatatccggttaaattatggttaacgccaacaactctatggcaaggaacaataatacaaatatgatttcgaccaacagctccgccagtagctctgataggtaagtgttctttatctttagctacttggacagcgatttttttgtaagttatagttgttccataaggaatttttagtaaggcctgccaaactcttttctgaaaatcagtaccagtaaagtgtaattgaggagtaaaagtaggctcttttccttgaaaataaatatctaaccattttttagcagaaactagatattcgttttctccttcggaatagttttttgcaagaatatctccatagtaacgatcagtatctagccatagcccaactagaccttgctcgtcactagcgagcaatatttttccaataggtgaattgtagtaagaaatagttttcattgaaatatatcttttttcagtttatccgtaattaattttttgtctgacaaaaaagaccagtgacttgaaacgttcactggtcttttcattatttagcgatcttatgtaccttatgtgcaatgaccatttctttattacggtcagtataaatcgcatcttttagataattcaaaggttgtcttaacaaacctttattagctaagaataaaaaatctgcatgatgatgattcaaatgatgcaaatatcttttagcgttcttaatcttagcgtgatgctctaaagcaagtttgggctcaaagtcagtaatcttgtgttcagcattatatactggcgtaactttgtgatgccacttgtcgatatggtgggtattatgtgcaccaatttctttacttgccttaacaatgtcttttttagtggctaaattatcttgatgctttaactgtgagtttttgtcatagtagtaatttccaaggccatcttgacgataaagttgcaaattctttaatgacttatctttattatcaacagttaccttcagaacatcgccatttttatgattcataagatacatatcatggtcaattgtataattatccttcatgactaaaatatccacctcttttatttatatctgaatgatattatagccacattttaagagaaagtatagtgattaagttatagttttaatcaattattaaattagttaaactttattaataattaaaaatattattacgctaaaaggcagttagaaattaattctagccgccttttagtgtatatacttaaatttattaatcttaattagtgttcttttccatcaataataacgtgaacacgtggattctttggacccttagctttagaaataacgcccttgttaactaaatcttcgatttgatctgcatcataaccaagttcagttaagatttccttgttgttttcgccaaggtcaggtgctctatcataagctggcttgtagttcgaaagactgaatggtaaaccaatagtcttgaacttaccacgattaccaccttggtcgatagtaacgattgtaccatcgctatttagatcaggatcgttttcaagttcatgccagtctaaaactggtccaactggaacgccagcagcaccaagctctttagttaaagtgtatttatcgtattgcttagtgtaggcttcgattaatggatataattcttctttgtgtaattgacggtgttgccagtcaacaaatcttggatccttttcccattctgggtgacccatagcttcacacattttatcccatttcttattttcattttgaataacgatatatacatatgcattaggatcagtttcccaacctttagccttgtaagtccagccgataacttgtccaccttcggtgttctcagcacgaggaattgccttgccccacttccaatttgggtaaactgcgtagtgaggtagagcacccaagttgtcaagcataagttggtcacgtaatttaatacggcaaaggttaagaacagcgtcttgcattgattggtaaacaaaagtaccttcaccggtgtgttcacgttgcaataaggcagctaaaataccgatagctaagtgcataccagtgtttgaatcacctagggcagctgcagattgagtaggaacattgtttacgcctttgttccaaccagttgcagatgcagaaccaccagcagcttgagcaacgggctcaaatgccttaacattttcaaaacgtgaaccttcattaaatccctttaatgaagcatagatcaatctaggattaatagagtgaagcttttcccagccaaagccgttacgatcagctgatcctggtgcaatgttttcaacaaagacatcagcttttttagctaagtcatacataatctttttaccttcaggagtcttaatatccaaagttaaagatctcttattggcgtttaattgtaagtagtaaagactccaagaatctttaatatcaagcaattcatttctagttgggtcaccagtattagtacgttcaattttaataacatcggcaccaagccaagctaaaagttgagtacatgatgggcctgattggacttgagtccagtcgacaattttaataccttttaatggagcatattcattttgttcatttttttcgttttcgctcattttaattactccttatcaattttcttttgttcagcttcttcaagaggctttaagtttaattctgggtttaaattaccgatgtggcctgattatttacccattgaaggatcaatttgaacgttgataatacttggacgacctgattcaacggctgtagcaaaagtatctttcatttcttgatagttagttacgtagtaattgtcaccaccgaaggccttagcgattaggtcatagcgaccagttggatcaagcgtagttggacctaattgatctggaacaacattgtcaacaccattgtaaataccaccattgttaataacgacaacagtaataggtaaattgtaacggcacattatttcaacatccataccgtcaaagccaaatgcactgtccccatctaaggcaacgacatgcttaccagtttcaacagcagtagcaatggcataacccatgccaacgcccatgacgccccaagtaccagtatcaagtctgtggcgaggaagtttcataccaatcatgtcacgaccaatatcaagcgtattagcaccttcacttacaaggtaggtgtctggatgttcttggaagtaatcattaataggttcgatagcgccgtaatatccaaattctgggttagtttcaccagccttaattcttttagcgaacttagcgtcattcttagcagtatcttgagcaattgcatcaagccagtcagaaggtaccttgtagccagttgcagtaagagctggaactaatttgtttaaaatagaggttaagtcaccttgaagtggtgcagaaatcttttgagcagaatcaaattgagttgcgtcgatgtctaattggataaatttagcctctgggttaaattgtggtgcatcaccatatgaaagcatccagtttaatcttgcaccaattaaaattactacatctgcattctttaatgataatgagcgggcagcagcggcagagtgtttgtcgtcatctgggacaagacctttagccattgacattggtaagaatggaatatcagtcttgttaatcaattcttgaacttgcttttcagttctgtcataagcagcacctttaccaagaatgatcaaaggttttttagcttgcttaatgatgtcaactgcgcggttgattgcatcgtcacttggttcttgaagtggagctgggtcaactaacttgtagacgcccatgttcttttcgccaaggtcatcattgagttgggcaatagtgtcagctggtaaatcaaggtaaacaccacctggtctaccagatacagcagtacgaatagcgcgtgcgactgctaaaccaacatcttgtgctctatcaacacggtaagcttttttacagaaaggcttagcaacgttgtattgatctaaaccttcgtagtcaccttgagctaagtcgataatatgacgttctgaagaaccagaaatcataattaatgggaaacagttcttagtagcttgtgctaaagcagttaatccattcaaaaaacctggtgcggatacagtcattgctacaccaggttttttagttaaaaatccggcagctgcagcagcgtctacggctgagtcttcacgacgaaagccataatacttcattcctcttaattcagctaatctagccaaatcagtaatcggaatacctacaactccgtataggttgttaataccatttttttgcaaagcgtcaattaataaaatggcaccagttctatttaaagagtcatctaccataacgtaacctccatggtaatgataattactattttatataaaagcgctattccaaaatgggatgcgtacaactaatttataactttttttgaatttgttagcaagaaaaaaactataaaaaaacttctatttcaatataaaaagcgctttctaaggccgcggatacaatagatatcttctattaatagtttcttatatattgcttctactacacagtgaattttaaataacgattttgtcagaattatgaaattgttttacttgctaatatttggataaagtctatatttaacttgtgatgaagaaagttttcatcgggagtaattaaactgatcagaatatgaacgaggtataaagatgattagtatcttagtaaatgacataatccctattttagtgattatgttactcggttatctctgcggaaagttttactttttcgataatgatcagagacaaggactaaataaattagtgcttgatatcgcattaccagcagctttatttatttcaattgttaaagctaccagaaaaatgtttgcgcaagatatcgtattaacgttgatttctattgttggtgttgttgggctatttatgctgagttattacttagataaattgctcttccatagaacgacgcagcaagcagctgtttgtgctttgattgcaggttctccaacaattgggttccttggttttgctgtgttagatcctatttatgggaataatgcaacaactaacttagttattggaattgtatcgattgtggttaatgctattaccattccattgggattagctttaattaacaaaggacaaactttaactaagaagaaggctaacgcaaatccaaataataagggaactaaggttgaagtagaagacataaagggaaagggcttaaataagactaagaagaaggtcgtagtaactattcccgatggtgttccagttactgatgcagaagctaaggctttgaaagaaaagggtattgagcgtgaaattgatttagctcgtgcagaaattgctgatcatgctgatgagcctcatcagccgatgaatccaactttaaaatcagttattaatgcaattaaacaaccggttgcagcggctccattaattgcagttattctagttttaattggaattagaattcctacatcttgggcaccaacttttgatttaattgccaaggctaacgctggtgttgctgttttagcagctggtcttgctttgtctacagttaagttttcaattgacaaagaagttatttggaatactttctttagactattcttaacaccagcagtgattgttgcagcagcatatctttgtggtatgggatcagatcctaccaagatttcaatgctttgtttggcaactggattgccaccagcattttatggaattattatttctagtcgctacaacatctacgttaaagaaggtgcaagttcagttgcagtttcgactgtcttcttcgcagtaagctgtattttctggatttggctattaccaattttggcacatatgttttaaacagaatttatatataattaaagggcaggcttttaacctgtcttttttattaggaatagaaaatgatagataataaaaacttactaaagattctgcggactgagcttagaaaaatgagtgataggaaaaggctcaaatttttaacttataagaaagatcgaagtattactgtggaaaagactggggatagctttgaggttattgaaaatggctatcgcaaaattgcttggcataatctaactgaagcagaagttttaaagcaaataaagaaagtgcagaagatagaatttcctcgaagcaataagttgtatttagtaagaaattaaaaaagtacttgtaaaatactttcctctgatttatactaagccgtgaattgaataggcgatgacgttcgccattaaacgagcaaaatctaatgacgtctactatttacctacacaagttgtgtaattgatagtaggcgtttttaattttgctcttttttgttttgggaggtaaaaattatgactgtttatattgaaaaagttcgcgcaatggaaatttttgattctcgtggcaatccaactgttgaagttcatgttgcactttctgatggtactattgcaaaatctgaagttccatcaggtgcatcaactggtgagaaagaggctgttgagttgcgtgatggcggtgaatgcttggatggaaaagggcgttatgaatgccgtaaataatgttaatactgaaattaatgaagctttaaagggaagaagtccatataaccaagctgcaattgataatttaatgattaagttagatggtacaccgaataaggcacggcttggtgctaatgcaatcttaggtgtttcaatggcagttgcgagagctgcagcaaaatctaagaatgaacctttatatcgctatttaggtggctgtgacttagagttaccacaaactttccacaatgttattaacggtggaaaacatgcggataatggaatcgatattcaagaatttatgattacacctgtgaataagacttcatttagagatggctttgaaaaaattgttaacacttatcatactttaaagaaagttattgaagatgctggctttgaaactggtctaggagatgaaggtggctttgcttctaatttaaagagttctgaagaagctttgagaatgctccaagaagctattaaaaagctggttatgaaccaggaaaggatatagcaatcgcttttgatgcagctgctagttctttctataacaaggaagatggcaagtatcattttgaaggccacgtttgggatggagaagagatgcttgcatattatgacaagcttttgacagaatttcctgagattatttctgcagaagatccatttgatgaaaatgactgggataactttgaaaagtttactgctaaatttggcgacaagatccaagtagtggcagacgataacgtatgtactaaccctaagctagttagaaaagctattaaagataagttatgtaatgcagtattaattaaggttaaccaaatcggtacaattactgaaactttagaaacaattagattagctagaaagaataatatgactacgatggtttctcaccgctcaggtgaaactggagatacatttattgctgactttacagttgctactaatgcggctgaattaaaatcaggtgctccagcacgtagtgaacgtgttgaaaaatacaatcgtttattagaaattgaacaagaaataggtgtagaaaatgaacgcctggcacactttccaaacgatgtggatatggactaaaaatagataataaaaaataataattagaaataatacttcaaacataaaaaagacggatcatattgatctgtctttttttactcactatttgattttaatatcgccgtcttgtgtagaagcaattaatacattggagctatttttattttctataaaagtgctgcttgaggagctatctttgaccttaatatccccatcgcttgtatcaagcctataaccggtgaaggaagaattacttaccttgatatccccatcatctgtattaactttaaaaccatttttgctgattaatttattgatgttaatgtcgccatcatttgtatttattttgccatttggagctcttaagttagtgatgtcaatatccccatcatttgtagcaacagatattgaattggtagttgcgatattttcaacttcaatatcgccgtcattagtggacaaagtcacatttttcaaaagctgcttaggtaccgtaatggcaattgtaagatcactattaacatgatggacgccagaagccgattgtttaatagttaatacaccgttttttctattaacaattggttttaaatttttaggtccagcatattcgactttatatttatcgccgtatttaacagaaatatcggaaatagctaccgaaactgccagcttattaaaaccttgattactgatcgtggttctgatttccggtttactatcattatggtctgaaacaataatactgcaggctgaaagcaggattactagtgaagataataaggggattaagataaactttttattattatttttcataataaactcctaagatatagttagaattaattatcttatatttattaaacgaagtaaattaaatgaataacgaggagatattatgaaaaaattaccaccgattcagaaaattttagaagcttatacggcgattgtggataaacatgtgaatttaacaaaagatcaggcagaagtagcttcatctaatggagcaaaaacttatacagtaaattgggatgataatgagtaccattcaaatgataatgcaacttattggcaaggatatgccggttatcctgtaattgccgttttaatgctacaggggaaattgccatttaatcaaaaactagctgataattttaaatccgttaattggaatgaaataaattcaaagtttaagcgtaactatgccaaggctgctactgaggttattaagaaaaaagggcttgatgaaaatgaagtaatggcagaacttggagctgtttatgaagacttaaaaaagttaccaattacaattaagcgcggttctcttaggccacctaaggcgagaaaataattaagaagtatattatttttatcttactccttattttctagccacttcttatatatttgaattagatctgtattaatagggtctttttcagcttcaggattatcttgatttttaaccatgatcatccctgccaagacgttaggatcatcaggaaaatctggtcgattattagcaattacaatattagtaggataaccatagccagcattacgttcttcttttagataatgacgacagtttatctcaagttttgttccaggatttaatattcctagacttttaaatcctttagttaaattgaataataaatattctggtaattttaaatctgtattactcagatcctggcaatcttgcatgtatactacaggacgataatagaatgttccattgctatcaacactttgttgaataccgtagcgatgaaatgttccgataactttaacactttcgtaagttccttgcatattatgtttcctctttatctttttagatttatttttcacattattatatacgcaaaaaatactaaaaattttttatttttgagaggataatattctagattataaaaaaacgttgagtttaacgctcaacgttttttacatcaataagtttttacaaattaatcaagtaaatcatacttcaaagtcattaaaccatgaccttcgttaaccatgtttcctaataattcaacagtattatcgtagacagtatcagccatcttttggtttgcttcatttagcttatcttgaagttcgtcgccagagtattttttggcttctttatcagtttcatgttggatcttgtggcactgtgcaagactcttttgttcaaagtcagcttctaattcgccataaacgcggaagttaatatcacctagctgagcagttaacttgtttaaccagaaaatcttatttagatcaaacttaggaccagtttgaaagcttgctggagtagtagtgatattagtgtagaaaggaaccatgctgttaaaagtatttggaccaaaagctaaccattgaacaccagcgattttctcaggaacatcatttctaatttgtaagatatgggtttcaaagtttctgttaataccaattggacggaatgtcttcttctgttcagcacttccttgatcaccatatgcgtcaaaaggcgtgtcttggtaatgagaactttctgcccatttgatatcttcaatgctgatcttacgattagcgtggcagatgaagggttgattttgatcacttggttcaccgccaaagtcgggatcaaaataattgtgaatataccaagcgcgtggattgttgtagtgagcatctttaattgtagaagagccaaagatatgacgtaaattgtagccttcaagatcaggatttaagtggtattcttaaattaaattcttaagatcttttgaagatgcaaagtcatcgtcatcgaagtgaaattcatcgatatttagtcggttaggagcaattacataagcatcgtctggaatacggcgagctgcccagtggtggccaccaatagtttcaagataccaaatttcatctttatcagaaaatgccataccattcatttcgtaggtaccgtatttttctagtaaatatcctactcgttcaactccttcgtatgcagaatgaatataaggtagagtcagagttacaaaatcttcttcacctaagccaccttcttcaagcaatggatcaattccttgaatacgtgagttggtagtaatagtttcagttgcagtcatagcaatattgtctgaattgataccagcagctgcccaaattccgttttttccagatgcatcaggtgcactagtgtagcgaagagggttagaaagaaggtctgcgtcatcaatcttttggtggctaataacactttcgtaatgtttaggttgatcctttggcattacaacttcgaatctttcaggaataatagtacgaccgccatcttcactacgagcaatcattgttgagccatcaatagttgcattttttccaactaagatagtagtacattcggtttgcttcattaaaaaatctccttttctgttaacgtatttatttatattctaaaagatctttctaatgtaaagcaaaccttgaagctaaatttacaacaaatataaggtataatttgggtaaagtgtgattaacaagtgataatgtcttaactgttaacttaggaaaatgtcctaataagatattaactatgtcataatctcttttattggaggttatggattaaatgaagaggatttatttaactatgaaatatgaagaacagtataaagtcattaaagatcttattgatcataatgggaacaaacatagggctgctaaaaagctaggtatttctgttagacaagtaaatagaagaattaaacaatatcaagataaaggaaaagcggccttcgttcatgggaacaaagaccgcaaacctgttaattgtctcaccacagaaattaacaatcaaattgtaaccttatatcgctctaaatatcaagattgcaatctgaaacattttgttgagctactagaaaatttagaagatattcacgtctcttacactaaggtctatactctccttaaaaagcaagatattctatctcctaagccatggaaaaagactaagcgtgctttagcgaaaaaaagatggcgtacccaacaccctaagcaaacaaaagaagaagttgaagttgaagttgcagtcaatcatcagctggctgtggcagacgctcatcctcgtcatgaacgctgtaaatattttggcgaagaaattcaaatggatgcctcagtcttagtttggtttggtactcaaagagcctacctgcatctagcaattgataacgctactggcattattgttggtgcttattttgactggcaagaaaccttaaacggctattatcatgtcttcaaacaaattcttcaaaattatggtatcccactctgttttaaaacagataaccgcactgtattcaactacgaaactgctaagactaaatctgctcataaagatgtcctcacacagtttggctatgcttgcaaaactttaggcgttgatcttaaaactactagtatttcacaggctaaaggcatggttgaaagagctaatcaaactgttcaaagccgtcttaaacctgagttaagattagcaagtgtaaagacaattgaagaagcaaacaagtatctgatagaacagtttgtccctaattttaacaagaagtttggcaataaaactcgcaaagggtggtctatttttgaagttgctcctagtgaacgcaaaatcaattacacgcttgctgttcttagtggcagagtatttgatagtggctcagctatttcttttaagaataagctctatcaagctgtagatgaatacggcaagttaatttgtttcatgaaaggcaccaaatgcttggtaattgaagctctaaatggacagctattagctacagtagatgatcatgtttatttactcaaagagattcctaaaaatgcaaaaatatctccagaaatagatcaagagcctaaaaagaaaagagctggaagaaaatatattccgccaatgtcacatccgtggaaacgtgagtcatttttaaggcaacaagcaaaagctcacaaatatcatcaatatacataaaaagcggagaaaaattctccgctaataattaacaaattttaggacattatcctaagttattgacatagtttttatttgataaagatacgattgaaagtcaccactaatttgcgcagtgtcaggatttgaagcattgaattgatatggttcacgtaatccaaatttttgtaaaactctacccgataccatctgatcaaaattaatttgatatttttgatgatcatttaaatgtttaagagggagatactgatctaaagtttcattaggtcgcgcaagtttgcgataaaatccgacaatctgtttattagaattgcttacactccaagcataagtattttgtgagggatcaaattttaatagttgatcaaaagttccattgaccaacaatttacgattttctttataccatctaatccaatttttaatttggttcttttcttctgttgataacttatttaggtctaactcatatcctaaaggaccaaagcaagcaacattttgtctaaattttaagcttgttattctttttacttgatcgttaggaacagcagaaacatgattactaaacgtagataaaggatacgccaacaaggttcctgacatagtatctaatctttctactgcatcactgtcatcacttggccaaatttgtggactataatatagaattcctaaatcaaagcgtccgccaccactagcgcaaccttcaattaacaggtcaggaaaacttgttaataactttgcgtataacttataaacaccttgaatatatctgtggaaaaattcaccttggggatgattaatagaatacaaatacggcgaatatgcctcagtaatatttcgattcatatcccatttaatatagtctacttgagcatcttcaattattttagccatctgctgatagatattatctaccactgctggatttgcaaaatcaagtacatattgtctgcgtccaactgaataacgcttgtaaggatgtctaacaacccagtcgggatgcatattatatagttcagtatctgctgaaaccatttctggttcaaaccataagccaaatttcatccccattttatgcacctgtgcactgaaatgatccaatccttgtggaaactttcttttatccactgtccaatttcctaatgaactgttatcactatctcgtttaccaaaccatccatcatcaagaacaaaacactcaattcctagttggttagcctgagctgccaatttcagcagcttttcttcattgaagtcaaaataagtagcttcccaattattaattacaattagtctatctcgttgttgccatttttgatcaataatatgttttttaacaaaattatgcgtctgcttcattaagccgttaaagccttgcttactgtaaaacaagacagcttctggtgtagaaaaatcctgatttggtgccaatttccacttaaaagtagctggattgattccggtcatcaacctactttgtccccattcatcaacttccacttggctaataaaattgccagaataaattaaattacttgcatatatatttccactgtcatttgtcacatttttatccacaagtgcaataaaaggattttcttgatggcttgacgcgcctcttaacgattcaattttagtaattccttgcgttaacggacgggttgtaatatgccgctctttagtccaagctccagataattgcagaaaatcataactatcattcggcaaatcgagaactgtactttgcaagttagtaagtttaacttcttgcttaccatgattaataatcgttgccttacgcactattgccgacaagttttcaaaaatactatatgaaagttgcaattctaactggtgatcagtatcaattaaggagacaattaaattttcactatcatttccatatgaagtaggaaaatctaagtttcttttcttacctgtcgtaatctcaaaatgatcgtatttaaaatcaggatatagatacgcgccctcattttcaatacttacagcaccctcacgaaaatcgcttgtaccgtacgttgggaattcctgcattcgatcagcgagtgtaaaatttttaattttttttgaatatttcactgttccagaagctttatttggatgaagcgacatatattctaaatcgttcttagataattcacctaaatcttcaccataatataagtgctctaattggtgattaggcaacaatccaaataagtatgcgactgcaccattatgtaaataaaaatatttattatcaattacatcaatcattggtctctaccttatcaagagctaaattatctaaatattgcgtcttttctgaaaactagctcttcttttcctgtcttatccttaaaaaagcaattagccaagcttatgactaattgccctctcttatttaatttgatgcttatctactaagcttttaacgctacttttagcctctgttaagacatctttatcttctggattatctaaaactttaataatgattcttgcaacttctcttgcatcattttctttaaaacctctactagttattgctggcgttccaattctcaatccactagtaataaatggacttctagtatcaccgggaattgattctttattagttgtaatatttacagaatcaagcaagttctgtgcatcttttcctgttaccccagttttagtaatatcaacaatcattaagtgattattggttccgcctgatactacgcgaatattttcactctttttaaattcgtccgccattgcttgggcatttttaaccacttgctcaatatatgtagaaaattctggctgcagatcttcataaaaagcttgtgccttggcagcaattacatgctctaatggtccaccctgagtacctgggaaaagagcagaatcaatctttttacctaattttttattgttagataaaatcattccgccccgtggtccacgtaaagtcttatgagtagtagtagtaactacgtctgcgacaggaattggacttggatgagctcctgtagcaactaacccagcaatatgtgccatatcaaccatcaaataagcaccaacttcatccgcaatttcacggaatttttgccagtcaataattctgctatatgccgaagctccggcgataattaattttggtttattttctaaggcaatttgtctaattttttcaaaatctaattcttcagtttccggatttaaatcataactaacagaattaaaaatttttcctgaaaaattaacctttgagccatgagtaagatgcccaccagcatccattcccatccctaaaattgtgtctcccggctttaatagagcattataaaccgtcatattagcttgtgaaccagaatgtggttgaacatttgcatattccgcattgaataattttttagcatagtcaatcgccaattgttctacttgatcaatatattggcacccaccgtaatatcttttgcccggatatccttctgcatatttattcgttaacacagatccttgtgcttctctgacagcatcggaaacaatattttctgatgcaattaactctattgtatcttcttgccttttttcttcattcttaattgcatcccaaagtgctggcgccttttctccataattcatcgattaattcctcccatgctttcagaatcttttcgctttacccaaattataccttatatttgtgtcaataacttaggataatgtcctaaaatttgttaattattagcggagaatttttctccgctttttatgtatattgatgatatttgtgagcttttgcttgttgccttaaaaatgactcacgtttccacggatgtgacattggcggaatatattttcttccagctcttttctttttaggctcttgatctatttctggagatatttttgcatttttaggaatctctttgagtaaataaacatgatcatctactgtagctaatagctgtccatttagagcttcaattaccaagcatttggtgcctttcatgaaacaaattaacttgccgtattcatctacagcttgatagagcttattcttaaaagaaatagctgagccactatcaaatactctgccactaagaacagcaagcgtgtaattgattttgcgttcactaggagcaacttcaaaaatagaccaccctttgcgagttttattgccaaacttcttgttaaaattagggacaaactgttctatcagatacttgtttgcttcttcaattgtctttacacttgctaatcttaactcaggtttaagacggctttgaacagtttgattagctctttcaaccatgcctttagcctgtgaaatactagtagttttaagatcaacgcctaaagttttgcaagcatagccaaactgtgtgaggacatctttatgagcagatttagtcttagcagtttcgtagttgaatacagtgcggttatctgttttaaaacagagtgggataccataattttgaagaatttgtttgaagacatgataatagccgtttaaggtttcttgccagtcaaaataagcaccaacaataatgccagtagcgttatcaattgctagatgcaggtaggctctttgagtaccaaaccaaactaagactgaggcatccatttgaatttcttcgccaaaatatttacagcgttcatgacgaggatgagcgtctgccacagccagctgatgattgactgcaacttcaacttcaacttcttcttttgtttgcttagggtgttgggtacgccatctttttttcgctaaagcacgcttagtctttttccatggcttaggagatagaatatcttgctttttaaggagagtatagaccttagtgtaagagacgtgaatatcttctaaattttctagtagctcaacaaaatgtttcagattgcaatcttgatatttagagcgatataaggttacaatttgattgttaatttctgtggtgagacaattaacaggtttgcggtctttgttcccatgaacgaaggccgcttttcctttatcttgatattgtttaattcttctatttacttgtctaacagaaatacctagctttttagcagccctatgtttgttcccattatgatcaataagatctttaatgactttatactgttcttcatatttcatagttaaataaatcctcttcatttaatccataacctccaataaaagagattatgacatagttaatatcttattaggacattttcctaagttaacagttaagacattatcacttgttaatcacaatcgtatctttatcaaataaaaactattgacagaaaaatctaagccaattacaatatagataaatttttttgaggagtacttaattatgaatacacaagctaattttattaagaataatcgttggcaaggccagtaaatcaggttgttagctagatgcaacctgaaagattcagattgtatctgtgctggctgtgtatttattgtggtctgcatggaagaaacatgcagaccttttcttttataatcaaaaatgatagggatctgcatggagtcagattcctattttttgtggggaaaaattatgaaaagaatgtatggattcattgcaattttaataacttttttagcagtagcttttttcactgaaaatcgtgaacaagaagcagataaaaaagtaccgcaggttggggttttaactttaatgcatcacccagctcttgatgaaatatatcgtggctttaaagcagaattaaaagaagcaggatatatagatggaaaaaatatcaaaattgattatcaaaacgcaaataatgatcaaagcaatttgcgtactatggctactaagttaactgatgaacagtcaaaggtacttgttggaattacgacgccagctgctcaagcattggcaaattcaaccagtaaaacgccaattgttttaggagcagtaacaaatccaaaagcgagtggtttagtgaaaaatgaacgccatccagaatcaaatgtaactggagtatccgacgctgctccgattaaacaacagttagatttaattaaagaatttatgcctaatctgaaaacactaggagtaatttatacttcaagcgattcttctgcagttagtggttttcatgaaattgaacaagaatgtaaaagaagaaaaataaatttaaaggtattttcaatagcaaatagcaatgatcttaatcaggtatcagagcaaatgtttaggcaggtggatgcggccatagtacctactgataatacaattgctggagcaatggaaactttggttaaaaacggaaatgctgctaagaaacctatttttccagcggctgcaacaatggtaaagcaaggtggcttagcaacatatagtgttaatcagtacaaactggggcagatgactggaaaaatgacaattgccattttaaaaggtaaaagggtcagttcattaccagtagaaagagttcaaaaaggagaacctgtggttaacttaaaagaagcaaaagaattgaatctccaagcgccacaaagatttctaaaagagtgtcaaagaaatggggttgtgtacagatgaatttgatcgtatctgcaattggtcaaggattattatgggcattattaggcttaggattatatttaacttttagaattttaaattttgctgatatgacagtcgaaggaactttcccattaggagcagctgtggctgttgctaatcttgctcatggaatgtcaccatatttggctacttttttagctttgcttgcggggatgcttgcagggttagtgaccggtttattatatacaaagggaaaaattccgattttgcttgctggtattttgacgatgactgcgatttattcaattaacttgagaattatgggcggttctaatatttcattaattggtaagaaaactctgcttaataatgaatttttgagatctctacctcagtattttaatagcgtggtcttaggaataatagttgtagtaattattacaggaattttggttttctttttaaatacagattttggtcaagcttttattgctacgggagataatcctaaaatggctaagtctttaggaatctatactgattcaatgataattatcggtttaatgctttcaaacggaattgttgccttgtgcggagcattaattgcgcaaaataatggctatgctgatatcaatatgggcattggaacgattgttattgctttagcttcaattattattggtgaagtagcttttggagaattaacgttaaatcaaagattagtagcagtgactttagggagtattatttatcgcttaattttattagcagtcttacaactaggcttttcagctaatgatttaaatttaatttcttcaattgttttggcactttgcatgatgctgccacaattagagaaaattgttcacttaaagaagccaatagagaaaggagtgaagaagcatgactaagccaattttagaattaaaagatgtaaagactactgtaaagacagctgatggtgaaatagttcctattttaaagggaatagatttaaaaattaaagctggggattttattactattattggaacgaacggagcaggcaaatctacgctgttgaacactattgcgggtagtttaagaccagatagtggttttcttctccataatggactggatattactaaaatgagtgaagaaaagcggacacaatttattggacgtgtttttcaagatcctaagttggggactgctccgagaatgacagtagcggaaaatcttttgttagcaactaagagaggtaagagaagatttttaagaattagaaagttaaagcaaaacttaccacgttttaaaaaattagctgcagtcatgaacaatggcctagaaaatcgcttaaatacttttgtagaaggtttatcaggtggtcaaagacaagctctaagtttcttaatggctacgattgaaagaccagatattttgctgctagacgagcatacagcagcgctagacccacatacaagtgaaaatttattggcagtaactgatcagcagattaaggaaaataaattaactgctttaatgattacacatcatatggaagacgccttaaagtatgggaaccgtctcttagttttaaaagatggaaaagttaaagctgatattaatgaaagagaaaagcaaaacttaaaagtaggtgatctatataaatattttgaagattaatatgaaagctagagccagttgtcggttctgctttttttagttaaaataatttttaattgttttaagcatatatttaataataaaaatgggggaagctgtgaataataaaagacataaaataagtttattttcagcaataatgctagcccttaattcattgattggatcgggatggctctttggatcgggatcagcagccaaaattgcaggcccagcagctatcttgtcgtggataattggtgcagttattattattgcaattgccttgacttatgttgaacttggagcgatgtttcctgaaagtggcggaatgagcaaatatgctcaatacagtcatggacccatgcttggctttattgctgcttgggcaaattggatttcattagtaactttggtaccaatggaagcagttgctgctgttcaatatatgagctcatggccatggaaatgggcaaattggactcattattttatgcaaggcggtaatataacgacacctggattattagttgtatttgcgttcatgattatttttactttaattaacttttggtcgattaagattatgacgcactttactaatttaatttctgtttttaaggttttgctgcctacaattacaattattatgttatttgcatctagttttcatcctgccaattttggtcatgatgtaaaaacttttatgccttatggaagtcgagcaatttttgaagcagcttctggagctgggatcattatgtcttatgatgcttttcagacgattattaatattggtggagaattaaagaatccacgtaaaaatattattcgcggagttttgatatcgatgctggtaactgcagctatctatatcttgcttcaaatagcctttattggcgcagtggatccagcaatgattgctaagaactcgtggcatggaattaactttgcctctccatttgcggatattgcaattttgttaggaattaattggctggttatcttactgtatatggatgcttttgtttcgccatttggtactggagtagcttttgtagcaacggcttctagagcattagctgcaatgactcatactaaacatttaccagcttggttaggtagactcaatcggcgctacttagtacctcgctttgcaatgattgctgatttaatcttagcgatgatcttagttagtgtttttagaaattggaatttactagcaacggtaatcacttgcgcaactttaattgcttatttaactgggccagtaactacgatcactttaagaaaaatagctcctgatttagaccgtccatataagcctggatatatgcgatggtttgctcctttaacatttgtactaactagtttggctatttattggacaatgtggccaacgacaattcaagttattttggtaatcgtgttaggcatccctatttatttctattatgaagttaaatatcaaaaaagaaattttaagtcgcagtttaaacatgctgcttggcttttaggttatttagtatttatctcaattatgtcttattgcggtagtgacggttttggcggtcaaaactggatttcatatccttgggatttcttagttattagtattgcatcattactattctataaatttgcaatcaacagtggcctagaaaaaattgattctgccgcaaggaaagtaaacgaaaaaattaagcttgaagaagactaggaactgaaatcgtaactataaaatagcttgaattatagttagaaaggtgctattcttaactagtcgtaaaataatctatgatctgaaatattggtcatggcaaaggagtattaaacaatgagaaaagggattcatccagattaccaagaagttgttttcatggactcagcaactggtgctaagttcgtagctggttctactttaaagccagaagaaacaattgaatttgaaggtaagacttacccattagttcgtgttgaaatttcttcagattctcacccattctatactggcaagcaaaagtttgcacaagcagatggtcgtatcgaaaaattcaacaagaagtacggtatttcttcaaagaactaataattcttggtattttttaccaaaagagcagcccactttggactgctcttttttcatgattaacgtggtataattcttattgatatgcacgtgacctttttctgataagtgtaaatcagtataatatggttacatgcaattttaggtaggagtaatttatttattatgaaaatgcaacttgctgagatcgccaaagcattaaatagttcagttaatatgggagaagataaggtcatcacttctgttgtttttgattcaagaaaagcaactcccaattctttatttatcccattagcaggtgtaagggatggacatgattttgtatctaatgcaatggcaaatggagcagaagcaactttatggaaaaaaggccatgaaggtaagccaactgatgtgccagttattgaagttgaggatccattaacagcacttcaatctttagctaaatattacttaggtaaagttaacccaactgttgttggtattactggttctaacggtaagactacaactaaggatatggttgcagctgttttagctaaaagatttaatgttcataagacacaagccaattttaataatgaaattggtgttcctgtaaccattttagagatgaaaccatccactgagattctagtacttgaaatggggatggatcgcccaggacaattacatcatttaagtgaattagtaagacccgatgtttgtgtaattaccatgattggtgaagctcacatcgaattctttggtactagggataaaattgctgatgctaagatggaaattactgatttcttaaaagaagacggtaagtttatttataacggtgatgaaccattgttagaagaacgcgcagctaagattaagcaagacaagagtacttttggatttagagaagaagatactgtttttgcaactacttttagatcttacatgcaccacgctacttttgaaataaatgattcagagcagcagttcaaaattccaatgattggtaagcataatgtgtctaatgctcttgcggcaattagcgtaggacgtcactttggcgaaaatgatgagcaaattgctcaagcattggctaactttactccaactgcaaacagaatgcagtggaaaaagggagacgtaggcgaagcaattatggatgatgtttacaattcaaatccaactgcagttaaggctgttactacttcatttggccaggtgatggttcaagatggtggacgtagaattgcagtcttgggtgacatgttagaacttggggatgaatctgctgaacttcatgcttcacttgctaatgccttagatccagcaattattaacgaattatatttatatggtccagaaatgaagaatttgtatgatgcacttgttgataaatatccagcagcaaacttgcattattatccacaagatgaaatgaatcatatgattgatgacttaaagaatgatattaagccagctgatattgtcatgctaaaaggatcacatggaatgcatttagaaaaggttttagaccgcctaatgtaggaaggaattagatatttgaaattttctgaaatgaacttgaaacctgaaattttaaaagctattaagcgttcaggttttgaagaagctaccccaattcaagaaaaaactattcccttggttttagagggaaaagatgtaattggtcaggcacaaactggtactggtaaaactgctgctttcggtttgccaattttacagaatttagataagcaacatgactcgattcaagcaattgttattgagccaacacgtgagctcgctattcaaacccaagaagaattattccgtttaggtcgggatgaaaaagctcgtgttcaggttgtttatggcggggcagatattcgtcgtcaaattcgtgctttaaagcaaaccccagcaattttagtaggaacaccgggacgattactagatcacttgaaacgtggaacaattgatatttctaaagtgaaaacgattgttttagatgaagcagatgaaatgcttgatatgggatttattcaagatattgaaagtatcttgaattatgcttcaagtaaacatcaaacgttgcttttctcagcaacgatgcctaagccaattttacgaattggtgagaaatttatgcatgatcccgaaattgtaaaaattaagggaaaagaactaactgctaatttaattgatcaatattttgtaagagcaaaagaaaacgaaaagtttgatattctatgtcgtttgattgatgttcaaaatcctgacttagctgttattttcggcagaactaaaagacgtgttgatgaattaacgcgtggattacaagctcgtggctataatgctgcgggaattcatggtgatctttctcaagctaagcgaatgagtgttttaaagagattccgtaaaggtaagcttgatattttagtagcaactgacgtggctgcgcgcggattagatatttctggggtaagtcacgtttataactatgatattccacaagatccagattcttatgttcaccgtattggtagaactggacgtgctggtcaaaacggaatgtcagtaacttttgttactccaaatgaaattggctacatgcgtactattgaacaattaacgcataaaaagatgatgcctctcaaaccgccaacagatgaagaagcatttaagggacaattgagtgcagcaaataagaaggtaacagaattattagatggtgatctttctaaatatactacagaagcatcacaactacttgatgattattctgcagtggatttagtagctgccttgttaaagaatttatctaaagatgctgaaagcgtaaaggtaaagattacacctgaaaaaccattgccatttaaatcaaagcacggtaacagtaatcaccattttaaacgtaacttcaagcgtggtggcgatcgaaatgaaagatatcatcgtaagccgaatgcccgtcgtggtggtagaaaacatgactttgtaattaagaaaaaagactagtttttaattgggagctgtagttgctacagctcttttttgtaatataatgtatcaatgtgtgaggtaaaaataatgattagaggctttggaattgactccgttgaagttgagcgcatgaaaaaaattgttgagaaaggtgataaatttgccaaaagagtgttaactccaaaggaatttgcccaatatcagcaattaaaaggaaagcgaagagttgagtatcttggtgggcgtttttcattaaaagagtctttttctaaggcactagggacaggcctaggtaagtatgttggctttcaagatattgaaaccttatgggatgatttaggatatccagtaacgacgtcgactaagttttctggaaatatttttgctagtatcacacatgatgatcatgagattataacaggtgtagttttggaggaattaaattaatggttccaggtattcatcgtccagctgtggttaaagtcaatttgggcgcaattaagagaaatattgaaaatgaaatgcagcatcttgaaccaggccaaaagatgcttgctgttgtaaaagctaacggttatggccatggtgcagtagaagtagcaaaagtagcagatcaaattggagccgctggattctgtgttgcaattttagatgaggcgctagaattaaggcgtgcagatattactaagacgatcttagtcttaggtgtcgtttctcctgaatatgctcctattgctgcagcgaatgatatttcactgactgttccaaatttagaatggcttaaagaagcagaaaaatatttagaaaattcagacttacaattgaaaattcatttgggcattgattcaggaatgggtcgaattggatttaatgaggataaggactttattgctgctaataagtttttagaaaataatgataatttttatattgaaggaatgtttgcacattttgcttcagctgatagtagcgatgaaacttactttaagcaccaatgtgaaaaatttaaccatatgaagagtttgcttacagtaaagccaaagtggattcatgttgataatactgcagcaagcatttttcataatggaattaagagtgatttagttagattcggaattggaatttatggcttaaatccttcgtctaatcctaattcacctgatttgaagtcaaagattgccttagatccagctttatcatttgagagtgagttaacgcacgtgaagacaattcatcagggtgatggagttggatatggttcgacatttgttgccgataaggatacgattattggaacagtgccagttggttacgcagatggttttattagaaaattccaaggtttcaaagttaaagtaggtaatacatattgtccaattgttggtcgtatttgcatggaccagtttatggttgaaatgccaaaggaaatgccgcttggaactaaagtagtaattatttctgataatcctgatgatttaaataatattaaagcagcagctgattatgttgatacgatccattatgaagttgcttgtttattgaatgatcgcttaccgcgtgtttattacgaagactaaaaaagactcgtttagccaaattgagatggttaaacgagtctttttattgatgagaatttaatcttttaattctccaggttgttctgcactacgaattgttagtccagattgaagatcctcaatttcgggtactacaaaacctttcttttctagacggtttacaattgccgtcatagtttcgcgagaaacaccgattggtaaagtaaataagttacgacgaactaattcaccagttttaacatctaaggttaggcagcctgcgatattactgtacttagaaatgatttttgccattttaactaagttaccacgatcattgtcagaaagaatagttaaaacataagaaccattcttaatgttccaagcatcagaaagcatgtctagtaaacgagcgtgagttaaaattccatagaagtggttttcttcatccaatacagcgatgtatgggaggtctttaatattaaagaatacacggaagaaaggtgaatttaccttaatagttttagtagcattcttaagtaagtaggttacaggcaggttcatatcgccgccttgagacttatgacggtagatatgcatcttataaatatttccacggaaaatagttcctgtgtcatctaaaataggaacacaacggaaaccggagtcttctaaaatttttaatgcttcggcaagagtagctttttcgttgactgtagttaagtaatcttttttataaacaagagatttaattagcatgattagcctccatacatctgaaatttacaagccattataccatagttttatataaaaattaaagtctgattaaacaactttaatttgaagaagaaaaaagcattcacttgtcgtgaatgctcttctgtagaaaaagtcttaattattgacgaacttttacgccagtttctttgaaggctttgtccataacttctttcaattgctttgcagaagcttccatcttagcttgttcgtcagcgcttaatggcatttcaataacttgttccaaaccgtgacgaccaacaactgctggagtaccaatgtgaagatcgtgtaagccgtattcgccatccataggtactgaaagtggaagaactctgtgttcattgttcaagatagctttagtaatgaatgctaatgcagtaccgataccgtagaaagtagcacctttcttgttaatgatatcgtaagccatgtcagcaacttctttatggattgcttcaagcttgttttcgccaacttctgggtgagcttttacccagtcgctaacttttacgccaccaacattgttgtagctccatactggaaattcagtatcaccgtgttcaccaagcatgtatgcattaactgaacgaggatcaacatgttccatttcaccgataactttttgaagacgaccagtatcaagtgaagtacctgaaccgataacacgatccttagggaaacctgacattctccaagttgcgtgagttaaaatgtcaactgggttagcagcaactaagaaaataccattgaatccagattcaacgattggttcaacaattgaagataaaatctttaagtttttgttaacaaggtcaagacgagtttcacctggcttttgtggagcaccagcagaaataactactaagtcagcgtcttttgcgtctgaatattctgcagagtaaatagtctttggtgcaatccaaggagttgcgtctgctaagtcaatagcatcaccttgagttctttctttaacgatatcaacgatacctaattcttgagcgataccttgttgaactaatgaaaatgcgtaagtagaacctacagcaccgtcaccaacaagaataatcttatgaattttttcttctgacatttgctaatacttccttccatattagtgatttatttaacaataagattatatcatattgaaatttaaaaattaaaaatataattttaaagatgtagtttattatttgtaagtaagcctgtgctataatctcaagagcgaaagaatatagaattagatatttgtcaaagaggatgaaaaataatgaagttaattgcaggtttaggaaatccaggtaaaaaatatgatcagaccaagcataatactggctttatggcattagaccattatttaagcaaaaataacttagatctagataaagataagtttgagggactatggaccaagcagaaggttaacggtgaagatgtgatctttcttgaaccacaaacttttatgaatgattcaggaaagtcaattgcacaagtagccaatttctttaagattgctccagaagatatcttagttattcacgacgacatggatatgccaatcggaaagattagaattcgtgcaaatggaaaatcaggaggtcataatggaattaagagtattatggcctgtttaggaacaaataatttcaaccgattaaagattggaattcgtcatccgcaaaaagaaagtgttgtttcttgggtattaagtccttttaatgatgaacagcaaaagttaatggatgcagcttttgaggttagtgaaaatatcattaatgatttcattaagggaaagaatgcccagtatttaatgaatcagtacaattagaatgaatattacagaattacttaataaagacaaagatttaaataattttattaataaagctctaaaagaaaaacgttcacttttaactggagtaaattctggagcttttagtgctgtcttgatgcaaatgttaagcacttggcagcgtcccttaattttagttgaagatagtgaagataaggcacaactgctcttagatgagctaggaaatttattacctgatgagatggtatttagttttccggttgatgccacaattgcaacacaaactgctgtcgcttctccagatgaactaagtcaaagactgcaaactttgaaattcttgactgaaaaaagagccggaattgtagtaataactccgcaagcattgcaatataagctaagtgatccgcgagattttattaaagcaaagcaagtgtttaaacctgaagcagaatttgacttagatgaattgactgcatggttcacacaagctggatatcgtagagaaaacattgttgcacgtccaggcgaatttgctcgtcgtggtgacattcttgatgtttatcctttagaccaagaaaatcccgttagaattgaattttttggtgatgaagttgatactgtaaaagaatttgatgcagcaacacaacgcagcttggaagaaaaagatattgtttcaatcgggccggctttagacagagtattttctagccgtaatctgcatgaggcaattgaaaaaataaagcaagatatgaatgaatcaattgccaacgaagaaaatgttaaaaatcattttgttaaagcaattgacttgcttgaagcggacggccttcccgaaaattatgcttttttaattgattacctactacccaagtcgtttaatttggtggattatcttgataaaaatggcttacttttatttgatgattggcaagcaatcaaaaagaatgttgctgatgtagatgctcaaaacgaagcttttatttccgaagaaataaaagcgggcgcaatgttaaatagccaaaaattacggcataattttgagcaagtcgtgcaaaaagtgaaacaggcgcaagtgctattttcactgtttcaaaaaggaatgggtcgcctaaaatttgatcaaatacttaattttactacgcgagaagtgcagcaattctttagtcagatgccactaattaaaagtgaattaacacgttttgcaaatgaaggaaatacggttgttttacaggctgattcggcaactcgtgctaagcaaattgctcaaaatttagtagattatggtgttgatcttccagttgttaaacctgatcaaattttggcaaaaaaagctcaaataactgttggtgactttgcacatggttttgctcttcctagtttgaatttggtgtatttaactgaacgtgaactgtttaatcaaagaccacaccatcgtaaacgtattaaaacacttgaaaatgctcagcgtttacggaactataacgaattaaagccaggtgactatgtcgttcatgttaatcatggtattggccgttttgaaggaattaagacattagatgtagatggaaaaaaacgtgattacataacaattacctatcaacatcatgatcaactatttgttccagctgatcaattaggattagttcaaaaatacgtggcatcagaaggtaaagttccgcatattaataaattaggaagtgcagaatgggccaagactaaaaagcgagttcaatcaaaggttgaagatattgcagatgatttaatcgaattatatgctaaacgtgaatctgaaaaggggtttgcttttagtccagatgatgatttacaaaaagagtttgaagatgcttttccttatccagaaacgcctgatcagcttcgttcaattagagaaatcaaggcggatatggaaagtcctaagccaatggatcgcctcttagttggtgatgtaggttttggtaagactgaagttgccttaagagctgcatttaaggctattcgtgatggaaagcaagttgcatttttagcaccaactactattttggcacagcaacattttgaaacaatgcaggatcgttttaaaaatttcccagtcaattgtgcgcttctatcacgttttcaaactcctgctgaggtaaaggcgataattgaaggggtaaaaaatggcaaaattgatatggttgttggtacgcaccgtttactatcaaaagatgtaaaatttaaagaccttggtttattaatagttgatgaagagcagcgatttggtgttaagcacaaagaaagactaaaagaattaaaagctaatattgatgttttgactctgacagctacgccaattccacgtactttacatatgtcaatggttggagtaagagatctttctgtaatggaaactccgccaaccaatcgatacccaattcaaacttatgtcatggaagaaatgcctagtgttgtacgtgaagcagttctgagagaaatgaagcgaaatgggcaggtatttttcttgcataatcggattgatgatattgataaagtagttagccgattagaagaactaataccagaagctaaaattgagtatattcatggccgcatgagcgaaaatcaaatggaagatattatgtatcgtttttcaagaaatgaatttgatatcttagtaacaacaacaattatcgaaactggagttgatatgcccaatgtcaacacaatgattgttgaaaatgcggatcactatggtttaagtcagctttatcaattacgtggtcgaattggacgaagtgctcgtttggcttatgcttattttttgtatcagcctaataaggtcttaaccgaaattggtgaaaagagattaagtgctattcgtgactttactgaattgggctcaggctttaagattgccatgcgagacttgtcaattagaggagccggcaacatgctaggaaaacagcagcatggttttattgatagcgttggctatgatttatatgctcaaatgttagatgatgcaattaagaaacgtaaaggcaagaaagttgctgttaaatctaatgccgaagtgcaatttaatttggaagcatatattcctgatgattatattgccgatcaggaacagaagattgaattttataaaaaaattaaagggattaatgaccaaaaggaagcagaaaatatcgctgatgaattaattgatcgttttggagattatccattagcggtggaaaatctgttaaatgtatcaaaagtcaaagcagatgctgatttagcccaagtagtagcaattaatcagaagtcaaatgataaattacagattattttcaataatcgcgctagtgaagaattagaagggccaaatatttttaaggcattagaacatgtgtcattaagagccaggattaatatggatccacaaaagagaatgaatgtcatgcttgaacttgaaaaaaagatgagcactagacaattatttaatgagctgcacacattcttaacagcagcaagtgatattgttcaaaggtagagaggaaaataaaatgagaatcgataaatttttaaaagtatctagattagttaaaagacgtacagttgctaaagaaatggcagatcaaggaagagtaaaagttaatgagcgagtagttaagtccagttatgacgtaaaagtcggtgatgttattgaaatcggattcggtacaaaacaattgaaagctcgtgtgcttgacttgagagaaacgactaagaaggctgaagcaagcgacttgtatgagctaattgattaatgacaagggaagagtaaggtgttatattaataacaagtggtgatataattaagatttagaatataaacgaaaaggcagggacacgcgtatgcagagagggccacgactttataatgccttaagcgatgaagaacgcttagcgcgcttacggcgtaaagcagctaggaaagaaaaagaagttcatcgcgttcggcgaaatcgaattgttgcttgttttgcaattgcaattttaatttttggactgcagttaattatggtccatgtacaaacaggtaggattaatagtcaaattcaaacgaataagacagagttaaaccaagttaataaaactaataaaaaattaaaggcgcaagtggcagatctaaaagatcctgattatgtggctaaagtaatacgttataagttctactattctaaatctggcgaatcaatatatactcttcctgataaagaggaggattattagtgaaatttccaattggattaagacttaatgctaaagttaacaatattactaagcttgggctctttgtgactttaccgcaccatcatcatggcttgattttttataaggattttggtgataaatgggaaagtgctaggaacaagtacagtattggagatgaagtcagggcagttattatcaataatcatcagggaaagctttcgctctcactgagtcaagtaaataatcctgatttaattgatccgactaatgaatttaaagacagtaaagactttactcctttagcaaagctagtagaaaattctacaaagaaaatagcagatttaaaaaattcaattgaattaagtgaccagtaagggtcacttttttatttaacaatgacagaatttacaaatttttttactaaaaataatattgaaattaaaaataaaaagtttttattagctgcaagtggtgggcctgattcagtggcactatttcacatgttagttaattttttacctaatccttcaaagcagttgattgtggctcatttagatcattgtctgagaaaagatagttatttagaaagtgagctactacaaaagttaactaccgcttttaaaataaaactgatagaaaaaagctggcccgttgcgcttcatcctcaaactggtattgaagcaaaggcgcgtgagtttcgctatgcatttttagctcataccgggaagaaatatcaggttgattacttattaacagcgcatcacggcgatgatttaattgaaaatattttactgaaatttattcgctcaggggatgtagctgaaatgaatagtcttcagatcgtaggaaatcttgactccatgaggctattacgaccgctaattaagtattcaaaggatcagttgttagaatatgataagagaaacggcttagattatattgaagatgagactaattttgaagatgatactttaagaaatcgcttaaggcattatgttgttcctttattgaaaaaagaaacgaaccatttggttgaaaatgcctatcgttttagcgaaagtgcagcgctactttcagactgtcaaaatagtttttttgaaagtttgattttaccaattgactttggtaaagctttacgaggtaaaaagtcagatctaataaacttaaatgaaaatcaactagcagctttttttgattatctagtttataaaaagtggcatcaacgagttcattttgatgaaattaggcggaggaaaaaagcaacttttaataaagaaaattttcaattaattttttatcaagattattattacttgataaatagaaacgggttaacgccaattgactctaagaaaaagaaaattaaactcgatgaaaagttttctttaaatggaaaagaatatctaatttcgcatgataaaaaaataggcaacttagttggatatttctatggagtgagaactgattttttagaggtaggaagtttacctcaggggagcaagttaagactagctgatggcaggcaaacaaaagctaagaaaaaatttgcggagaatgggattcctttgatattaaggccatattgtttaactatttggcagaaagaaaatccagtttatgttgaaaatgtttatcaaaatcaagaatataatgcaaattttgttcgatataatgtgtatatttatctttaagtttatgcaaagttctatggtaaaagcggaatttgtggtaaaatcgttggagtaattccaagaagtgtcgcggaggtttatagatgaaaaatagaagaaatagactgctttctaacggtcttttctatatcatagtattcgtgatcctcttggctggaatcaattgggccgtagggggctcaggtagtaatggttccacagaaaatatccgttattctcaattagtaaaggatttaaaagcgggtaaagtcaagagtatcaatgtacaaccatcaaatggtgtatatacggttactggatcttataagaaagctcaaaaatcaaagaatcaaaataatactggatttggacttattccaagttcacaaagtagtagtgaagtaactcgtttcagtactacgatgcttcaaaatgactcaatggttaagacagtttcagatcttgctcaaaagagcggagcatcaatttctggtcagggtgaatctcaatctggaacttggatttctaccattgttatgcttgtcccaactttgatttttattgtcatgctttggatgatgatgaaccaaggcggacagggtcgtggtggcggcatgatgaactttggaaaatctcatgttaagccacaagacccaagtaaaaataaggttagattctcagatgtagctggtgaagaagaagaaaagcaagagttagttgaaattgttgaattcttaaagaatccagcaaaatatactaagctaggtgctagaattccagctggtgttcttcttgagggccctcctggtactggtaaaactttacttgctcgtgcggttgctggtgaagctggcgtgccattctactcaatttctggttcagactttgtagaaatgttcgtcggtgtcggtgcctctcgtgtacgtgacttatttgaaacggctaagaagaacgccccaagtatcatctttatcgatgaaattgatgccgttggacgtaaacgtggtaacggcgtaagtggtggtcatgatgaaagagaacaaactttaaaccaattgttggttgaaatggatggtttcgaaggtgatgaaggtgtcattgttatggcagctactaaccgttcagatgttcttgacccggcacttcttcgtcctggccgttttgaccgtaaggttttagttggtcgtccagatgttaagggacgtgaagctatcttaaaggttcatgctaagaataagcctttagctccagatgtcgacttaaaagaagtagcacgccaaacccctggttttgttggtgctgatcttgaaaatgttttaaatgaagctgctttagttgccgctcgtcgtaataagactgaaattacagcatctgatattgatgaggcagaagaccgcgttattgctggaccagctaagaaagacactgttatttctcctgaagaaagaaaacgtgttgcataccatgaagcaggacacgcaattgttggtttagtcctgagcgattctagaactgttcgtaaagttacgattgtacctagaggccgtgctggtggatataacattatgcttccaaaagaggatgaaaacatcatcactaagaagcaattaatggaacaagttgctggtttaatgggtggtcgtgctggtgaagaagtagttgttggtgataaatctactggtgcttcaaacgactttgaacaagctactaacattgctcgtggtatggttactcaatatggtatgactgacgttggtatgactgaacttgaatctccaagtatgcaagtaccttatggaactaagccatacagtgaggctacagctgctaagattgatgaagctgttaaagaaattcttgatgaaggtcacaaacaagcagttgatatcattaagagccaccgtgaaactcataagattattgcagaagcattgctcaagtatgaaactttaaacgaaaagcaaattctttcattatttaagactggtaagatgccagaaaatgatgagaatgaatttccaagtgagtccaaagcttcaacttatgaagaagcaaaagctgcaatggaaaagaaggatcaacaaagagaagaaactgaaaataaggatgacaaagaagacgttcatccacttcctgatgatcataagaatattgacgatattccacttaacccaccatctgaaaagaagaattctgacgaacacaattcagatgaaaacaaggataagtaagagtttattgtaagagtgatgtttatactcctttctaatactgaaattacagattttagaaaggagttttttggtattaagaatgaaatatttaagtaaaaaagacaaaaagattttaaaattaagcttaataagttgtttgacaactatggtgctctttttccttttatctactttcactgattgtaatccaatctttgggggagtattgtatggaggagatttacctaatcagtatttatctttctttcaatattatcgtcatttagttttaggaaattgggcaagtgctgggtatactttttccaatggactaggtggagatatggctggtaacattgcttactatgtcttaagtccattaaattttatagtttttctttttcctgcaaataaaatcaatattgctgtttatgtaataatcttgtttaagctaggtttgatgagtggtacatttacttggctcattttaaaatggtttaactttaaatatcaggcctatgccatttttttaggaatcgcatatagtttaagtggctattcagttgcttatgctggaaatgtcatgtggtttgacggattaattttgttgcctttaatcacttatgctttggttagaggaatcaagattaataaatggcttacttacagtattttactggcttgtgccattatatttaattactatattggttacatgatttgtatctttatggtaattattttcctagcatatacaatcaataattttaaagacattaaactatttttccatcagtttttgaattttgcgatcagttctattattagtggtttaattagtgcaatagtcctattaccaactctatttaatctttcaagtaataaattagcacagtcggattttaattcgaattttaatattaagctccttattactgggggaaaaacagtatccagactgtttattggagatacttacaatgattggccaccaatttttgtaggtacattagctgccataatttttattatctactttattgattctcgtaattcagttaaagccagaatcactaatttgataattggaattatatttgtcttaagtattatcgtgcgtccattatacttattctggcatggtggacaacaaactattgcttacccttatcgttttagttttttaatcgtattttggattttacttttagcagcaaaagagctgtcatatcagaactttaagaaaaaagatagaattatagctaccactatttatttattattgagtttgatgacggtgtatattcgtcgtcgaatcggaccaaataatttttatgaatggatagctgtagctttagtactgctctttggactattaatttacttctcaaataaaaactttgttcgaattattctaatattggttggattagttgaattatcgggaaacgcatatactggtcttagccatttgggaatgaagagtgattattatcctaaatatgttgcagaaaacagtgaagtaatttctaagattccggcagctgataagacaggtagaatcgctaaaaattatgaattaaataatgatcgcggtgaaggatatacttttaactatcgtggggtagaagaattttcatctaataatgattcacgaattagtagtttgatgactgatttgggattttcaacatttagatacttctattactatcaaacgggtactgtagttactgatgctatctttaatgttaagagctttattaacagttctttgactaatcaaagtatttcaccagaatatgttaactatggtttaagagatgatttaaaaactagaccagttattttaaaacagggcgataaaactgtgtatcgaaatgaaacacttccatttgcctttgctggtaatttatctaataaattaaagtttaaagatgaaaatcctgtttataatcaaaacttagttttaaattctttgactcaatctaagtctaatgttttggattatagtaataaaaaggcacggattacaacaaataacttgtcagtgaaatatggtaaagtaaaatatcatgtcataaagaaacataagaagattactaagcgtactgaacaaaaatatttcacaattaagagatatgataaagagcgtcctgggacgatgaggttcacctatgataatctaaagcctaaccaggtgggatatattcgttttagtaaaaatttgatgcaattagtgcttgctttaaataattatcaatggaataaaaatcctgattatcgtcctccatttagtgtgactataaacggtaaacaagttcaacttcaagaatatacggaccaattaattggcgttcaagctgataaaaatggaaaagttgatattaaaatgaccgtagatggaaagggtggcaagttcattcttaaataccctaaatttgtgaatatcgacttttcagctttacatgataaagtcaaaaaagcgcacgaaagggaaatgaaattcacaagttttgaagatggatatgtagctggtaaagttaaaattaataaaaatcaaaatttagtaactactattccttatagtaagggctggcaagttaaagtagacggaaaaccagttaaaattaatcgtactttgggtgtatttattggattaaagatgaaaccaggaactcatcaaatcacattgaaatatagaacaccaggtgtattagtaggtgctctcttgagcattatcggtattatttccttaatcgtatttactttgtttttaaagaagaataaaaaagattaattatcagatacacttctcgaagctaattattgagaagtgtatttttttaagtagataaaatttagtaatatcgaaagtattaaattgcttattggcgctgtaacaagtatcataggtataatcctattagttgtatttaattttatttagaaaagaaaaagtattaattaaagaatgaagtctatgttttataggctttattttttaggagaaagaaaaatgaacgattatttagtaaaagcaattgataaaactaaaaatttaagattaattacggttaatgctaaagagttagtaagtgaagctcaaaaaagacatgatacttggagcgcatcttcagctgtgcttggtagaactttaattggtggattacttttatcggcggccttattgaaagataaagatgagttaacagttagactgcttggaaatggcccagtaggagcaactgttgtaacagcaaaagctgacttgactattaagggatatgtccaaaatccgcatattgctcttccacctaaaaaagatggacacattgatgtagccaaagctgttggtgaaggttggcttgaagtgacaaaagatcagggattaaaagaaccttatactggtcaagttccaattgttagtggagaaattgcggaagatttcacatattatttagcaaaatctgaacaaattccttcagcagtaggtttgtctgtctttgttgaaccaaacaatagtattggagctgcgggtggttttgtattacaggcattgccaggagcaactgacgaacaattagctcaagtggaaaagagaattaaagctcttcctaatctttcaactttattcctagatgggatgtcacctgaaaatctagccgaaagtatcctaggaactgattgcaagattttagctaaagaaaatgttgcgttttcttgtgattgttcaaaagaaaaatatagtaaaattttagctacacttaaaccaggacaactaaaagaaatgattgaaaaagatcatggcgcagaattagtttgccgtttctgtaaagaaaaatatcattttactgaagatgaattaaaagatgtcctgaagaaggcaaattaaagtggtgtgtagtggatagttttgctatgatattagggtatttgaaaggatgagcaagtgtgaaaaacgatagttggaaaattagggatgttgaaattcctaatcgtgtagtagttgcaccgatggctggaatttcaaatgctgctttccgagtagtatgtaaagaatttggcgcaggcctagtggtttgtgaaatgatttcggatcatggaattatttaccgcaataaaaagactttagagatgttaacagttgatcctagggaacatccgatgagtattcaaattttcggcggaagtgaagaaactttagttgaagctgctcattatgtggatactcatactgccgctgatatcatcaacatcaatatgggatgtcctgtgccaaaagtaactaagactgatgctggagctcgctggttgttagacccaaataagatttatcagatggttcatgctgtagtccggaatgtaagcaagcctgtaacggttaaaatgagaactggctgggatcaaaagcatatatttgcagttgaaaatgcactagctgctcaagaagctggtgcaagtgctgtagctatgcacggacgtacaagaaagcaaatgtacatgggagaagccgactgggaaaccctgaaggaagttgcagatgcattaaccataccttttgttggtaatggggatgttacaacacctgaaaaagcaaaagcaatgcttgaagatgttggagctgacgcagtaatggtaggtagagcagccttaggcaatccatggattattaaagacatggttcactatttagacactggtgaaaaactacgcccacaaacagttgaagaaaaggtagcaactgctaaagaacagttaaatggtttaattgatcttaaaggtgaaaaaattgctgtaccggaatttagacgtcaagctgcttattatttaaaaggaattccccgttcagctcgaacccgtgctaaaataaatgatgtttggacgaaacaagaagtttttgacttgttggatgactttgtggaaaaatatgaagcaagacaaaagcaatttaatcgatagaaggagtttttagagtggcaaagaatgaaatgaacgaccaactaattgttcgtcgtgaaaaaatggacgaaatgcgtgaaaatggcattgaaccttttggtgtaagaaagttcgatcgtcaagatttagctcgtactttaaatgaaaagtatagtaaagaagataaagatgaattaaatgcagatatgcctacgaccaaaattgcaggtcgtatgcttgcaaaacgtggtaagggtaaagtaggttttgctgatctttatgaccgtactggtaagattcaaatctatgtacgtaaagatattgttggcgaagacaactacaagatttttaagaaatcagatattggtgacttcttaggtattgatggcgaagtaatgaaaactgatactggtgagttaactattcgtgcaactcacgttactttcttatctaaggctcttcgtcccttacctaataaatgggatggtttaaaagatgttgaacaaatctatcgtcaacgctatcttgatttgattactaatcacgaaagttacatgcgttttgttcatcgtactcaaattattcaagctattcgtaactacttaaataagcaagacttcttggaagttgaaactccagttcttcacaatattccaggtggtgctgaagcacgtccatttattactcaccacaacgctttagatattgatctttatatgagaatcgctttggaacttccattgaagcgtttgattgtcggtggtatggagagagtttatgaaattggtcgagtattcagaaacgaaggtgttgatactcgccacaatcctgaatttactgagcttgaaacttatgctgcttactgggatttccacgatgtcatggatgaagcagaagaaattatcagagcagctgctaaagttgtttctccagacggtaagattaactaccaaggtactgatattgacttaggtaagccattccgccgtgttcatatggttgacctaattaaggaaaagactggtgtcgatttctggaaagaaatgactgacgaagaagctaagaagatcgccgaagaacatggaattcatactgaaccattttggaaagttggtcatgtaattaatgctttctttgatgaattttgtgagaagactattgttgatccaacctttgtgtatggtcaccctgtagaaatttcaccacttgctaaaaagaatgcagatgatccaagatttactgatcgtttcgaaatctttattttaggaatggaatacggaaatgccttttcagagttaaatgatccagttgatcaacgtcaccgttttgaagaacaaatggaagaacgcgaagctggtaacgatgaagctgatatgattgatgaagattatatccgtgctatggaattcggtatgcctcctacaggtggtttaggtatcggtatcgaccgtttggtaatgcttttaactgacgctccagctatccgtgatgtattgctcttcccaacaatgcgtcctgaaaaggttgaagatgttgatgcagaagtacaagaagatttgaagaaaaagaataaatagctttaaaaatagactgtctttgaagatggtctatttttttgattttttcagaaaaagtactgtcaataacttaggataatgtcctaaaatttgttaattattagcggagaatttttctccgctttttatgtatattgatgatatttgtgagcttttgcttgttgccttaaaaatgactcacgtttccacggatgtgacattggcggaatatattttcttccagctcttttctttttaggctcttgatctatttctggagatatttttgcatttttaggaatctctttgagtaaataaacatgatcatctactgtagctaatagctgtccatttagagcttcaattaccaagcatttggtgcctttcatgaaacaaattaacttgccgtattcatctacagcttgatagagcttattcttaaaagaaatagctgagccactatcaaatactctgccactaagaacagcaagcgtgtaattgattttgcgttcactaggagcaacttcaaaaatagaccaccctttgcgagttttattgccaaacttcttgttaaaattagggacaaactgttctatcagatacttgtttgcttcttcaattgtctttacacttgctaatcttaactcaggtttaagacggctttgaacagtttgattagctctttcaaccatgcctttagcctgtgaaatactagtagttttaagatcaacgcctaaagttttgcaagcatagccaaactgtgtgaggacatctttatgagcagatttagtcttagcagtttcgtagttgaatacagtgcggttatctgttttaaaacagagtgggataccataattttgaagaatttgtttgaagacatgataatagccgtttaaggtttcttgccagtcaaaataagcaccaacaataatgccagtagcgttatcaattgctagatgcaggtaggctctttgagtaccaaaccaaactaagactgaggcatccatttgaatttcttcgccaaaatatttacagcgttcatgacgaggatgagcgtctgccacagccagctgatgattgactgcaacttcaacttcaacttcttcttttgtttgcttagggtgttgggtacgccatctttttttcgctaaagcacgcttagtctttttccatggcttaggagatagaatatcttgctttttaaggagagtatagaccttagtgtaagagacgtgaatatcttctaaattttctagtagctcaacaaaatgtttcagattgcaatcttgatatttagagcgatataaggttacaatttgattgttaatttctgtggtgagacaattaacaggtttgcggtctttgttcccatgaacgaaggccgcttttcctttatcttgatattgtttaattcttctatttacttgtctaacagaaatacctagctttttagcagccctatgtttgttcccattatgatcaataagatctttaatgactttatactgttcttcatatttcatagttaaataaatcctcttcatttaatccataacctccaataaaagagattatgacatagttaatatcttattaggacattttcctaagttaacagttaagacattatcacttgttaatcacatttttttgattttttcagaaaaagtacttgcaatcgaatgatgttttgctatactagtaaatgtactgcggaagtagttcagtggtagaacatcaccttgccatggtgggggtcgcgggttcgaatcccgtcttccgctccagtataaaagactcaccgaagtgtgagtcttttttgatattcgggatgtggctcagcttggtagagcgctacgttcgggacgtagaagtcgcaggttcaaatcctgtcatcccgattgaatattatttttattaaaaagttcgtcttaagctagaaagacgaacttttttgtatataatgttcatgaaatatcaaatagtttacatttactaattgtaagtgtaagatatttgtctaaagattgtagtatgatcttaaaagaaataaggcggtgcagaatggaaaaatcatatagtgatagtgcaaagaatgttcttgaaattgctaaagagcaagcacaaaactttcaccatcgaattattggaacggagcatgttttgcttgctttagtaattgaagctaacggagatgccggtaagcttttgcgtgaaagaaacgtaacaccaaccttagtgcgagaagaaattgaaagatatactggctatggttcaagtcccaaagctacatatatggaaatgtcaccacgcttaagcttagttttgaattttgctaagcaaaaatctgatgaattaggcactcctcaaattgaaacaaagcatattttgctggggttattagctagtgaccaaattttggcaagtttaattttgaaaaatattggtgtagaaccacgtgacttaagtcaagatattaatgatagtttcatggatgattctggagaagcaaacaatattttggatgtttcttctgcaactagaactaaaaaaggcaagtcactgacacctaatttagataaagtaagtgtaaatttaaataaacgtgcacgcgagggtgcaattgatccagtaattggtagagataaagaaataaagcgagtaattcaaattttatctcgaagaactaagaataatcctgttttagttggagaacccggagttggtaagacagcagttgcacaaggaatagcttctgcaattgtaaatcgtgaggttccggataacttagctaaaaaacgtgtcatggcactagatatgggaagtctaattgctgggactaaatatcgcggtgaatttgaagatagaatgaagaaaattctaaaagaaattcaacgagatggttctgtgattctatttgttgatgaaatgcacaccttgattggtgcaggtggagcagaaggtgccattgatgcttcaaatatcttgaagccatctttagcacgcggtgatattcaaatgattggtgccactacttttgatgaatatcaaaagtacattgaaaaagatcaagctttggcaagacgttttcaacaggttaaaattggcgaaccatcaaaagaagaaacagtggatatcttaaagggattacgtcctaaatatgaaaaattccacaatgtaaaaattgaagatgaagcaattaaagatgcagtcgaattttcaacaagatatattgctaaccgctttttacctgacaaggcaattgacttaattgatgaggcgagtgcagcagtcaagattcaagcagttggtaaggctgatccacgcttgactaagttagatacccaaattaatgatgttattcaccaaaaagaagaggcagctgaaaatcaaaactttgtacaagcagctaaattacgtgatgaagaaaataagcttacgcaagatcgggataaattaattgccagagtagagaacaagaactctaaaaaatctattgttgattcaaataaaattgcccagattgtatcagaatggacgggcgtaccagttactcgaatgaagaagagtgaaacgaaacgtttagctcacctcgaaagtattttgcatgaacgcgtaattggacaagataaggcaattagtgcagtaagtcgtgcaattagacgaagtagaagtgggattaaggatgagaatcgtccaatcggttctttcttgttcttaggacctactggggtcggtaagactgaattagcaaaagcattggcagcagcagtctttggttcagaaagaaatattattcgtgttgatatgtctgaatatatggatcaagtagctacaagcaagttaattggttctgctcctggttatgtaggctatgaagaaggtggacaactttcagaacgtgtaagacgtaatccatattcagtaattctgttagacgaagtggaaaaagctcatccagatgttttcaatttattgctgcaagttttagatgagggtttcttaactgattcaaagggaagaaaagttgattttagaaatacaatcattattatgacttctaaccttggttcgcgcagcttacaagaagataagacagttggctttgcggctgataacgaagataaaaataaacttcagcaagaaaaggttacagcagcagttaaacagttctttagaccagaatttttgaatagaattgatgaaacagttgtctttgatagtttaactaagaaacaattgcgtgaaattgttagtttaatgactagtcatttgattagtcgcttagctcgaaaagaagttactttaaagatttctccagcagctttagatgtgttagccaaagacggttttgatccagaaatgggagcccgtcctttgcgccgtgcaattcaacatgaacttgaggatgtaattgcagaagatttaattagtgaaaagattaaagctggtcaaacagttaaagttggtgctcatcaaggtaaattaaaatttacaattgttgataaagataagcctttagttaaaaactagttctttttgacaaattagtaatataagtgtaaaatacaaaacgtttaaaaggctgaaattcaggatttcgctgatctattgtccagcgagatgataaaacaaaaacgactattatgttgtttttgtttttttgtacccaaattttgactttttgcaatttgtaacacaaatgtaatatttagattcttatataagaaaggatgttttctttgttaggacacgctgtgaactacggtagtcaccggacaagacgtagcttctctcgaattaaagaagtattgaagttacctaacttgactgatgtgcaaacgcaatcttacaagtggtttcttaatgaaggtattcgtgaaatgtttgacgacattatgccgatttcagacttttcaggaaaactttctttagagtttgttgactacaaacttctgaagccaaaatacactcttgaagaagcacgtgatcacgatgcaaattactctgctcctcttcatgtaactttaaagttaaccaaccatgaaactggagaaattaagactcaagatgtcttcttcggagaatttccattaatgactgattcaggtactttcgttattaatggtgctgagagagttattgtttctcagcttgttagatctcctggtgtttactaccattcagattttgataaaaatggtcgccaaattttcggtgctacagttattcctaaccgtggtgcatggcttgaatatgaaactgatgctaaggatttagcttatgttcgtattgaccgtactcgtaagcttccattaacagttctaattcgtgctttaggatttggatctgatagtgaagttgctgatatgtttggtgaaagtgactcacttcgtttcactttagaaaaagatatccacaaaaatcctgctgactctcgtgttgccgaagccttaaaggatatctacgaaagattacgtccaggtgaacctaagacaactgattcatctcgttcgcttttgtatgctagattttttgatccaagaagatacgatttagctcctgttggtcgctacaagatcaataagaaactttctttaaagaatcggttattaagacaaaatttggctgaaactttagctgaccctgatactggtgaaatcattgctaaaaagggtgacgttgttactcatgaaattcttgataaattgtcaccttacttagatcgtgacgactttaagatggtaacttatgaaccttcaaaggaaggtgtcttacctgacccagtaacagttcaagaaattaaagtatattctaaggttgatcctgaacgtgtaattaagttaatgtctaacggtcatattgctgatgacgttaagcacttaactccagctgatgttttggcatcaattaactacttctttaaccttcaagataacatcggaactactgatgatatcgaccacttaggtaaccgtcgtattcgtcgtgtaggtgaattacttcaaaaccaatttagaattggtttagcaagaatggaacgtgttgtgcgtgaaagaatgtcaattcaagatatttctacagttacaccacaacaattaattaacattcgtcctgttgttgcttcagttaaggaattctttggttcatcacaattgtcacagttcatggaccaaaacaacccacttggtgagttaactcacaaacgtcgtatgtctgccttaggacctggtggtttgtctcgtgaccgtgctgggtacgaagttcgtgacgtgcactatactcactatggtcgtttatgtcctattgaaactcctgaaggacctaacattggtttgattaactctttagcaacttacgctattgttaataagtacggctttattgaaacaccataccgtcgtgtttcttgggatactcacaaggttactgacaagattgattacttaactgctgatgttgaagataattacattattgctggtgccaatgctccattaaatgaagacggttctttcaaggataagatcgttttagctcgtcataaggaagataaccttgaagttactcctgataagattgactacatggacgttattcctaagcaagtagtttcagtaacttctgcatgtattcctttccttgaaaacgatgactctaaccgtgccttgatgggtgctaaccaccaacgtcaggctgttccattgattaacccacatgctccaattgttggtactggtatggaataccgtgccgctcatgactctggtgatgcattagttgctaaagcacctggtgtagttgaatacgttgatgcaaacgaaattagaattagaagagacgacgatactttagataagtatgttcttgaaaaattccgtcgttcaaatgcaactaagaactacaaccaaacaccagctgttaagcaaggcgaaagagtagtagctgacgaagttattgccgatggtccagcaatggaaaacggtgaattagctctaggtcaaaacccaattattgctttcttgacttggaacatgtacaactatgaagatgccgttatgatttctgaacgtatggttaaagatgatgtctacacatctatccatattgaagactatgaatcagaagctcgtgatactaagcttggacctgaagaaattacacgtgaaattccaaacgttggtgaagatgcgcttaaagacctcgatgaagaaggtattgtacgtattggtgccgaagttcaagacggtgatatcttagttggtaaagttactccaaagggtgtgactgaattatcagctgaagaacgtttgcttcacgctatctttggtgaaaaggctcgtgaagttcgtgacacttccttacgtgtaccacatggtggtggcggtattgttcaaaacgtacaagtcttcacgcgtgaagcaggagacgaattgccacctggtgtaaacaagatggttcgtgtctacatcgttcaaaagcgtaaaattcaagttggtgacaagatgtctggtcgtcacggaaacaagggtactattgccttagtttgtcctgaagaagatatgccatacttgccagatggtcgtccagtagacatttgtttgaacccaatgggtgtgccttcacgtatgaacattggacaggttcttgaattacatttaggtattgcagctaagcaattgggtattcatgttgccactccagtatttgatggtgcttctgaagatgatatgtggaacatggttcgtgaagctggtattggtaaagacggtaagactgttctttacgatggacgtactggtgaaccattccataaccgtgtttcagtaggtattatgtactacttgaagttgactcacatggttgatgataagatccacgcacgttcaattgggccttactcacttgttactcaacaaccacttggtggtaaagcacaatttggtggtcagcgtttcggtgaaatggaagtttgggctcttgaagcttacggtgctgcatacacattgcaagaaatcttgacttacaagtcagatgatgttgttggtcgtgttaaggcatatgaagctattgtcaagggtgaaagaattccaaaaccaggtgttccagaatcatttagagttcttgttaaggaacttcaatccttaggtttggatattaaagtcttagatatggatcacaaggaaattgaattacgtgatatggacgatgattctaatgatcacttcaacattgacactttatctaagcttgctgaacaacaagaaaagaagaagttggccgaagaagctgcaaagaaagatgacaagtcagctgaacctgtagatcagagtgattcttcaacttcatctgatgataaggtttctaagtaataggaggttaaacttttgatcgacgtaaataagtttgaaagtatgcaaattggtttggcttctccaaacaagatcagaagttggtcttatggcgaagttaaaaagccagaaactatcaactatcgtactttgaaaccagaaaaagatggtttgttcgatgaaagaattttcggaccaactaaggactggtcttgtgcttgtggtaagtacaagggtattcgctatcgcggtattgtttgtgaccggtgtggtgtagaagttacttctgctaaagttagaagagaacgtatgggccacattgaattagctgcaccagtttcacatatctggtatttcaaaggtattccatctcgtatgggattagtgttagatatttcacctcgtgcacttgaagaagtaatatattttgctgcttatattgtaattgacgcaggtgatactgatcttgaagataaacaacttcttacagaagctgaatatcgtgaaaagaaagcaaaattcggtaaccgttttgaagctaagatgggtgctgaagctgtaaaggaacttcttgaacaagtagatattgacaaagaagttcatgatttaaaagaagaattaaagactgctactggtcaaaagagaactcgtgctatcagaagattagatatcttagatgcatttaagaattcaggtaataagccttcatggatggttatggattgtattccagttattccgcctgatttaagaccaatggttcaacttgatggtggtcgtttcgcaacttctgatttgaatgatttatatagacgtgtaattaatcgtaataatcgtttaaagagattgttagacttaaatgcacctagaattatcgttcaaaatgaaaaacgtatgcttcaagaagctgtagatgcattaattgataacggtagacgtggtcgtccagttgtaggaccaggtaaccgtccacttaaatctctttctcatatgttaaagggtaagcaaggacgtttccgtcaaaacttgcttggtaagcgtgtcgactactcaggtcgttcagttatcgatgtttcacctaagttgaagttttatcaatgtggtgttccacgtccaatggctttagagttgtttaaaccatttgtgatgcatgaattagtaaaacgtggcttagcatctaacattaagaatgctaagcgcaagattgatcgtgaagatgacgatatctgggatatcttagaagatgtaattaaagaaaggccagttcttttgaaccgtgcacctacccttcaccgtttaggtatccaagcattcgagccagttttggtacctggtaaatcaattcgtcttcatcctcttgcttgtgaggcctataacgccgacttcgatggtgaccagatggccattcacgttccattatctgatgaagctgtagcagaatcacgtttgcttatgcttgctgctcaccatatcttggctcctaaggatggtaagccaattgttactccttctcaggatattgttttaggtaattactggttaactcaagcagaacgtggtcacgaaggcgagggtatgatttttgactcaccagctgaagcagctattgcatatgcaaatggtgatattcactaccatactcgcattggtttagcagctgattcaatgcctgaaaagccatggccaaagggatatgaagacggaatttttgtaactacctatggtaagttagtcttcaaccaaatttttcctaaggatttcttctatattaatgatcctactcaagaaaatcttacccatcccgtagatgaaagatatttcttgcaaccaggtgaagatatccatgaaaagctagataatatgaaacttggaaaggcctttaagaaaggtttcttatcagattctattgctcaaatttacaaggattataaggttcaaagaacttctgatttcttggatgacttgaaggaattaggctacactgtatgtactacttctggtttgactattggtgttgaagatattcctacaattactgataaggatgatattgtagcagaagctcgtaagaaggttgacgtggtttctaagcaatatcgtcgtggtttgattactgatgaagaacgacatgatcgagtaattagtatttggaataattgtaaagatattgttcaaaatgaaattgctcaaattcatgctccaagaaacccaatcacaatcatggcagattctggtgctcgtggtaacatttctaactttacccagcttgctggtatgcgtggcttgatggctgctcctaacggaggaatgatggaaattcctgttacatcaaacttccgtgaaggattatccgttttggaaatgttcatgtccactcacggtgctcgtaaaggtatgaccgataccgcgttgaagactgctaactcaggttacttaactcgtcgtttggtagacgtagctcaagacgttattattcgtgaagaagattgtggtactgatcgtggcttgactgttcatgcaattactgaaggcgatgaaatgattgaaccattatttgatcgtctagtaggccgctacacttctaagagtgtctatgatccagaaactcatgaagttatctgcccagcagatgtcttgatggatgaagatatggctcataagattgttgatgctggcgtcactgaagtaactattcgctccgtgtttacttgcaacactcaacacggtgtatgtaagaaatgttatggtatgaaccttgctactggtgacgatgttgaagttggtgaagcagtaggtactgttgctgctcaatctatcggtgaacctggtactcagttaactatgcgtaacttccacaacggtggtgttgctggtgctgcagatattactcaaggtttacctcgtgttcaagaattgtttgaagctcgtaaccctaagggacgtgcaacaatttctgaagtaactggtgaaataacttcaattgaagaagatccagcagaacacactcgtcaaattactgtaaaaggtcaaacagatactcgtacttatgatgtaccatatactgcatctgtagcagttgctgaaggtgaccatgttgtacgtggagataaattgactcttggttctatcgatcctaaagaattgattcgtgtacgtgatgcattgactactgaaaaatacattctaagtgaaattcaaaaagcttatagaatgcagggtgtagaaattgctgataagcacgttgaagttatggcacgtcaaatgcttcaaaaggttcgtattcttgatccaggtgaaactgatatcttaccaggtgaattgatggatattggtgaatttaaggcaagaaaccgtgaagtaattatttctggtggtattcctgcaacagcacaaagtgtaattcttggtattaccaaggccgctcttgaaactaacagtttcttgtctgcagcttcattccaggaaactactcgtgttcttactgatgcttctattcgtggaaagaacgatccattacttggtcttaaggaaaatgttattattggtaagattattcctgccggtactggtatgcctgtttaccgtgaaatggaacctaaagttgacgttcctgaagatgaaaagaaaaagtcagtttattctatagctgatattgagaagaaattagccgcggctgatgcagagaaagataaaggctcagctgactaatcatcctttcaaaacttaaacatttgtgttaaaaaagtctattcgctcttatgcgaatagactttttttatataaaattataaaaaataatgctcaggaatataaaaggtataaaaggatattgtttttggttctgagtaattaagtgagtgattatcagaaaaatggatgataatagaaaaagatactcagcaatgtagaaatcatagtaaaaaataagaataataaaaattattgtatcgccataaccaaatttctttttcaaattcattattaagaagatcaatataacgaaagaaattaaaatccattcgattgtagtgtaattagaaatagagtaaggaattttaaatactacaatcgcaataagtggaataaggatttgaactggaaaagattgatcaatataatcgaaaatactaattaaaaaaataaaaatgatgaaaaagtatgaagtttggttagcaagagggtttaaaggcatgaaagctaggccacctaaaatttcacaataaaaggtttcaataggaatataagcgtgacagaagaaacatttcccttgatatcttagaaaagaaaaaataggtatttggttgagaagcgtaagcggaatttggcagttatcacaatgagatttatctgttataaagttctccgtctcaaatcgctgaacaattactagtagatgggaaccaatgatactaccaattacaaaattaaatatataaataaatgagtttgacatcttttaacctccaatatttatatacgcaaaattaaaaaattttttttaaaatgtttacggaattaaaaaatcatgttacactagccattgtgctattaaaaacatgatatccgtgaggtcaaaaaagaaactcccggatgtgtgaacaattttaggaggaaattttaatgccaacaattaaccaattggttagaaaaggccgtcactcaaagacgactaaatctgattcaccagctttaaactatgcttacaacagcatgaagaaaaagatgaactacaacccagcacctcaaatgcgtggtgttgcaactcgtgtaggtactatgacacctaagaagcctaactcagctttacgtaagtacgctcgtgttcgtctttcaaacttaatcgaagttactgcttacattcctggtattggtcataacttgcaagaacactccgttgttttaattcgtggtggtcgtgtaaaggaccttcctggtgttcgttaccacatcattcgtggtgctttggatactgcaggtgttgatggtagaaaacaaggccgttctaagtacggtgctaagaaaggttaaaacagttaaataggagggactactaatgcctagaaaaggtaatgttgctaagagagatgttttagcagatccagtttacaactctaaattggttactaaattaattaaccacttaatgattgatggtaagaaggcaaaggcatcttcaattctttacgatgcttttggtattattcaagataagactggtaaagaaccagttgaagtttttgaagaagcaatgaacaatgttatgccagtcttggaagttaaagctcgccgtatcggtggttctaactaccaaatcccagttgaagttcgcccagaaagaagaactactcttggcttaagatggcttgtttcttacgctcgtttacgtaatgaacatactatggatgaacgtcttgcaaacgaaattatggatgctgctaacaatactggttcagcagttaagaaacgtgaagacgtccacagaatggcagaagcaaaccgtgcatttgctcactaccgcttctaatcgttagtttgtaaaaggagattaatcttatggctaacaaacgtgaattccctttggataagacacgtaacattggtatcatggctcacatcgatgccggtaaaactactactactgaacgtattttgtactacactggtaagatccacaaaattggtgaaactcacgaaggtgactcacaaatggactggatggatgaagaaaaggaacgtggtatcactattacttccgcagctactactgctcaatggaaggattaccgtattaacattattgataccccaggacacgttgactttactatcgaagtagaacgttctcttcgtgttcttgatggtgcggtaactgttcttgatgctcaagctggtgttgaaccacaaactgaaaatgtttggcgtcaagctgaaacttacggcgttcctcgtattgttttcgttaacaagatggacaagattggggctgactttgacaaatctgttaagtcattgcatgaacgcttaaacgcaaacgcacatgccgttcaaatgcctattggttcagcagatacctttgaaggtgttattgacttgatcaatatggtagctgacgtttacgatgaagataagcttggttcaaagtgggatactattcctgttcctgatgaatacaaggaagaagctttaaagcgtcgtaacgaattaattgaagctgttgctgatgttgatgacggtattatggacaagtaccttggtggtgaagaaatttctaatgatgaattaaaagctgctattcgtaaagctactttgaatttggaattcttcccagtttatgctggttcagcatttaagaacaagggtgttcaaatgatgcttgatggtgttattgattacttaccatcaccacttgacgtaaaaccttacgttgctcatgatcctaagactggtgacgaagttgaacttatggctgacgataagaaaccatttgcagctttagcatttaagattgcaacagatccatttgttggtcgtttaactttcatccgtgtttacactggttcacttcaatctggttcttacgtattgaacgcatcaaagaatgctcgtgaacgtgttggacgtttacttcaaatgcacgctaactcaagaactgaaattcctgaagtattctcaggtgatattgctggtgcgattggtttgaagaatactactactggtgattctttaactgatccagatcacccacttattttggaaagtttacaagttccagatccagttattcaagtatctgttgaacctaagtcaaaagctgaccgtgataagatggatgttgctttacaaaagcttactgaagaagacccaaccttccgtgctgaaactaacccagaaactggtcaaactttgatttcaggtatgggtgaattacacttagacatcatggttgaacgtatgaaacgtgaatttaacgttgaagcaactattggtgaacctcaagttgcttaccgtgaaaccttcactaaggaagctaaggcacaaggtaagttcgttcgtcaatctggtggtaaaggtcaatatggtgatgtttggattgactttactccaaacgaagaaggaaagggttacgaattcgaagacgctatcgttggtggtgttgttcctcgtgaatttattccttcagttgaccaaggtttacaagaagctatgaagaatggtgttcttgcaggctacccattaattgatgttaaggctaagttgtacgatggtagttaccacgaagtcgactcatcagaagctgccttcaaggttgctgcttctcttgctttgagaaatgctgctgctaaggctggtgccgttatccttgaacctatcatgaaggttcaagtaaccactccagaagaatacttaggtgatgtaatgggatcaattacagcacgtcgtggttctatggaaggtatggaagatagagcaggtgctaaggtaatcaactcatttgttccactttcagaaatgtttggttacgcaactactttgcgttcatcaactcaaggtcgtggtacatttacaatggtatttgaccactactcaccaactcctaaatctattcaagctgaaatcatcaaaaaacgtggtggagaagacgctgaataatttataaatgtagagtttgaaagagagatatcatatgatatctctttttttgtacaaaaaataaaataaaatgctgagaaagcttgatatttaaggaaagacaaagtacaatagtaaacgtgcgaaaatattggaggggtatatcccgcgcacaaaaagcaatgctttgacgcaaaaggttgcggcacaccaggctgcattgccacagaggtgagtcggtaatttttgccgagctagtcatcttttaaagaagacgaaggaggttattagatggcaagtcaacaaattcgtattagattaaaatcatacgaacatggtattctcgatgaatcagctgctaaaattgtagctaccgctgaaagaactggagcacaaatttctggtcctgttccactacctacggaaagaactttattcactgttttacgttcaccacacaagaacaaagattcacgtgaacaatttgaaatccgtacacataagcgtttaattgatattttgaatccaacacctaagactgttgattcattaatgaagcttgatttaccaagcggcgttgatatcgagattaaattataatttaaaacatatatggaggtgtaatcatgaccaaaggaatcttaggaagaaaggtcggtatgactcaaatcttcactaaaaacggtatcttggttcctgtaactgttattgaagcaacccctaacgttgttttacaagttaaaactaacgaatcagacggttacgaagcagttcaagtaggttaccaagacatgcgtgaagtattgagtaacaaaccagccaaaggtcatgctgcaaaagcaaagacttcacctaagcgcttcattcgggaaatccgcgatgtcgagcttaaggattacgaagtcggctcagaaatcacggtggactcatttagtgaaggtgacgtagttgacgttactggcactacaagaggtcatggtactcaaggtaacatcaagcgttggggccaatcaagaggtccagaaacccacggttctagataccacagaatcccaggttcaatgggttctatcattaaccgtgtacctaagggtaagaagttacctggtcacatgggtggcaagaaagttaccgtacaaaacttagtaattgaaaaagttgtacctgaaaagaacgtacttttagtcaaaggtaatgttcctggtgcaaagaactcattaatttttgtaaaatctgctgctaaagctgctaaataggaaggaggactataatggctaatttagaaattatcgatcaaaaaggtaagtctgcaggtaatgtagatttaaatgaagaaatcttcggtattgaacctaatgaaagtgttgttttcgatgcaatcattagacaaagagctggtaagcgtcaaggtacttctgctgtaaagaacagatcagctgttcgtggcggtggtaagaaaccttggagacaaaaaggtactggtcgtgctcgtcaaggttctattagagccccacaatggcgtggtggtggtactgtatttggtccaactcctcgttcatacaagatggacatgcctcgtaaagcacgtcgtttagctatgaagtcagttctttcccaaaaagttgctgacaaagatttaatcattcttgatcaattaactttagaagcacctaagactaaagaattaaaggctatcttagataatgctaacgtttctggtaaggttttagttgtgtctgatgataagaatgttcaattatcaggtaagaaccttccaaaagtgaaagttgtacctgttaatggcttaaatgttgttgatgcggttgactaccaaaaacttgtattaactcaagacgctattaagagaattgaggaggttttggcataatggatgcacgtgatatcatcttacggcctgtagttaccgaaaaatccatgaatttaatggatgataagaagtatacttttgatgtgcttgtatcagctaccaagactcaagttcgtaatgccgttgaagaaatttttgatgtaaaagttaagaatgttaacattatgaacgttcgcggtaaagaaaagagagttggtcgttacactggtaagactgctcgtcgtagaaaagcaatcgttactttaactgaagattctaatgatattaagatcttcaatgataataaagaaaattagtaaataggaggtcagtcaattggcaattatcaaatataagccaactacaaacggcagacgtaatatgacttcttccgactttgctgaaattaccaagaaaaagcctgaaaagactttacttgaatctcaaagtcatactgctggtcgtaactcatacggtcatattactgttagacaccgtggtggtggtcacaaacaaaaataccgtatcattgacttcaagcgtaataaggatgatgtaaaagcagttgttaaggctattgaatatgatccaaacagaactgctaacatcgctcttcttcactacactgacggtattaaagcttacatcttagcacctaaaggtctaaaagctggtactgttgttgaatctggtccaaatgctgatattaagcctggtaatgcattgccattatctgctattccagctggtactgaaattcacaatattgaattgaagcctggtaaaggtggtcaattagtaagaagtgcaggtactgttgcacaagttcttggtaatgatggtaagtacactttagttagacttcaaagtggtgaagttcgtaagattttatcaacttgccgtgctactatcggttctgttggtaatgaacaacactcattaattcaattaggtaaagctggtcgtaagcgttggttgggcaagcgtccacaatctcgtggttccgtaatgaaccctaacgatcacccacatggtggtggtgaaggtaaggctccagttggtcgcccacaacctatgactccatggggtaagaagtctcgtggtattaagactagaaactctaaggctagaagtgaaaaacttattattcgtcaccgtaaaggtaacaagtaattaaacgaaggaggttaattaatgagccgtagtattaaaaaaggtccttttgctgatgcaagccttttaaagaagatcgaagcccaagaaggttccgaaaagaagcaagtaattaaaacatggtctcgtcgttcaactattttcccttcctttgttggtttcacaatagctgtttacgatggaagaaaacatgtgccagtatacattactgaagatatggttggtcataagttaggtgaatttgtacctactagaactttccgcggtcacaaggtcgctgataaggccactactacagtaggtaaataataggaaggagagacatctaaatggcagaacaaattagttcagctaaagctgaagcaagaacagttcgcatcgctcctagaaaagcccgtttggtagtagaccttattcgtggaaagagtgttgctgaagctctcgcaattttacaatttacgccaagagctgcttccccaatcgttgaaaaagtgttgaagtcagctattgcaaatgctgaacacaactacgatcttgaaagtgcaaatctttacgtatcagaagcatacgtaaacgaaggtgcaactttaaagagatttcgtccacgtgctaagggtatggcttctccaattaacaagagaacaagccacgtagtagttgtagtatctgagaagaacgattaagggaggtaaatttaatgggtcaaaagattaacccaaatggtttccgtctcggtgttaaccgtgattgggaagcaaagtggtatgcagacaaaaactacgctgacactttaaatgaagatttacgtattagaaagttcatctctgaaaagttagctgatgcatctgtttccactgtggaaattgaacgtgctgcaaacagaattaacatttctatccacactgcaaaacctggtatggttatcggtaaaggtggtaaagaagttgaagctttaagaaaacaacttagtgctttaactaagaagaacgttcacattaatattgttgaaattaagaagccttatttagatgctaaattagtaggcgaaggtattgctcgtcaacttgaagcaagaattgcatttagacgtgcaactcgtcaagcaactcaaagatctatgcgttctggtgctaagggtatcaaggttcaaactgctggtcgtttgaacggtgctgatatggcaagaagagaatggcatactgaaggtagtgttccacttcatactttaagagcagatattgattatgcttgggtagaagctgcaactacttatggtcaaattggtgttaaggtttggatcaatcgtggtgaaattttaccacaacgtaagaacaaaccttctaagaaagcgaagggaggaaactaatagtgttagtacctaagcgtgtaaagcaccgtcgtgaattccgcggtaaaatgcgtggtgaagctaaaggcggaaagaccattgcatttggtgaatatggtttagaagctgttgaatctcactggattactaatagacaaattgaagccgctcgtattgctatgactcgtttcatgaagcgtggcggacgtgtttggattagaatcttcccacaaaaatcctacactgcaaaaggtgttggtgttcgtatgggttccggtaaaggtgcaccagctggttgggtagctgttgttaaaagaggcaagattatgtttgaaatcggtggcgtttcagaagacgttgcccgtgaagctttaagacttgcttcaaacaagcttccaattaagactaagtttgttaagaagagttcggaagtaggtggcgaatctaatgaaggctaaagatatcagagcattaaccactgatcaaatgttagaaaaggaaaagcaatataaagaagaactttttaatttgcgtttccaacaagcaacgggtcaattagagaacaccgctcgcttgagacaagtccgcaagaacattgctagaattaagacaattcttagcgaaaaagaattgagcaagaattagttaacggaagggagttattaacttgagcgaaactaacgaaagaaataatcgtcacgtataccaaggtcgagttgtttctgacaagatggataagactattacagttgttgtagatacctacaagaaccaccctgtttataagaagcgtattaaatactcaaagaagtattacgctcacgatgaaaacaacgaagctaagattggcgatactgttcgtatcatggaaacccgtccattatcacatgcgaagcgttaccgtctaactaagattgttaagaagtcaatttaattacgcggattttattgaggggaggataaactagtgatccaacacgaaagccgtttaaaggttgctgacaactccggtgcaagagaactcctagttatcaagattttaggtggttctaagcgtaaaaccggtaatattggtgatatcgtagttgctgctgttaaacaagcaacaccaggtggcgttgtcaaaaaaggtgatgttgttaaagcagttattgttagaacaaaatcaggtgcacgccgtgaagatggttcatacatcaagttcgacgaaaatgcagcagttgtaattaatgctgataagagtcctcgtggaactcgtatttttgggcctgtagcccgtgaactgcgtgagcacgatttcatgaagatcgtatctcttgctcctgaagtcttataattttttagggaggtgcactgatgtttgttaaaacaggtgacaaagtaaaagttattgccggtaaagataaaggcaaagaaggcactgtactttcagtcaacgccaagactaaccgtattgttgtcaaaggtgttaataagatcaaaaagcatgagaaaccttcacaagccaacgctaatggtggtgtggtagaaaaagaaggttctatccatgcatcaaatgtaaaagttattgctaaaaaagaagataacaacaaataggagggaggacgcacatggcaaacagtttagtagaaaaatattcaaatgaaatcgcaccagctatgaacaaaaagtttaattacgattcagttatggaaattcctaaaattgataaaatcgttttaaacatgggtgtcggtgatgcagtttctaatgcaaagaatcttgatgaagctgtagaagaattgactttaatctcaggtcaaaagcctttgattactaaagctaagaaatcaatcgcaaacttccgtttacgtgaaggtatgtctattggtgctaaggttacccttagaggcgatagaatgtacgatttcttgtacaaattaatcaacgtttctcttcctcgagttcgtgacttccgtggaatcagttctagatcatttgatggtcgtggtaactatactttaggtatcaaagaacaattgattttcccagaaatcgactacgacaaggtaaaccgtgttagaggtttggacgttgttattgtaactactgccaatacagatgaagaagctcgtgaacttcttactgagtttggtatgccttttgctaaataatttggaggacattaatggctaaaacatcacaaatcgtcagaaatcatcgtcctgctaagttttcatctcgtgaatacactcgttgcgagagatgtggccgtccacactctgtttaccgcaagttcaaattatgccgtatttgcttaaaagacttagcacacaagggtcaaattcctggtgttaaaaaggcaagttggtaattaacggtaaaggaggcaaattaaatggtcatgacagatccaattgcagattacttgactagaattagaaatgctaacatggcaaaacacagttctgttgagattcctgcatcatcaatgaagaaatcacttagtgaaatcttaaagaacgaaggctttattcgcgattaccaagttgaagatgacaacaaacaaggtatgatcaagattttcttgaaatacggtcctaataacgaacgtgttatttcaggtttaaagcgtatttctaagcctggtttaagaaactacgtaagtgcagaaaacttaccaaaagttcttaatggtcttggtattgctatcatttctacttctgcaggtgtgattactgataaagaagctagagaaaagaacgtcggcggcgaagttattgcttacgtttggtaattttgacagaaaggagaactattaatgagccgaattggtttaaaggtcatcgaggttcctgaaaaggtcacagttaccaaaaatggtgacgacatcactgttaagggaccaaaaggtgaacttactagatactttgatccacgcattacctttgaacaaaaagatggagaaattcattttagtcgttcaagtgaagctgacaaagctcttcatggtactgaaagagcaaatcttgcttccatgattgaaggtgtaactgatggatatgttaagaagttaactttagttggtgttggataccgtgcagttgcacaaggtaagaaattaactctaaatgttggttactctcacccagtcgtatttgaagcaccagaaggtgttacagttaaaaccccatcagcaacttcaattgaaattgaaggtatttcaaaacaagttgtaggtcaatttgcggcagaaattcgtgatgttcgtccaccagaaccttacaagggtaaaggtattcgttacgaagacgaatatgtacgtcgcaaggaaggtaagactggtaaataattaaatagaaaatttttgaggtgaaattgtgatttctaaaccagataaaaacaaattacgcttaaagcgtcataaacgtattcgtggaaagatttctggtactgctgagcgcccacgcttaagtgttttccgttcaaacaaaaacatctacgctcaattaattgatgatgtagagggtgtaacgcttgcaagtgcctcaacaaatgataaaaatatttcagctgaaggttctaagatggaacaagctgctgaagtaggtaaagctttagctgaaactgctgctaagaagaacattaagagtgttgtatttgatagaagtggttacttataccacggtcgtgtacaagctcttgctgatgcagcacgtgaaaacggattagaattctaggaaaggagaattaactaatggcaaaccgcaacgattctcgtagagattctcgtaaagatcgtaaaaaagacgatattgaagatcaattagtagcaattaaccggatcaccaaggttgttaagggtggtcgtcgaatgagatttgctgctgttgtaatcgtcggcgatagaaaaggtcatgtaggttttggtactggtaaggctcaagaagtcccagaagctatccgcaaggctgttgaagctggtaagaagagaatgattaaggtacctactgttggtactactattccacatgaagttatgggccattatggttctggtaacattatgttaaaacctgctgaagctggttctggtgttgctgctggtggtgctgttcgtattatcatggatttagctggtatttcagatgttacttctaaatcacttggttcaaatacaccaatcaatgttatccgtgctactatggacggtttgagtaagttaaagactcgtgaagatgttttgaaacttcgtgagtcagcaaaaagcttagaagattaaggagattaaataatggatttaaaagttaccttaattaaaagcgtcgcacaccgtcttccaaaacaaagaaagattgttaaagctcttggtcttggtaaggtaaatagcactgttgttcttccagacaacgctgcaactcgtggcgctttattgaagattgctcacctgatctcagttgaagaggttaataagtaattagaatccaaggaggtgccaattaatgaagcttaatgaattaaaaccaaatgaaggttcacgtcgcaacagaaagcgtgttggtcgtggtacttctagtggttacggtaaaactgctggtcgtggtcaaaagggtcaattagctcgtactggtggtaaaactcgtttaggtttcgaaggtggtcaaatgccattattcagaagaatgcctaagcgtggttttaagaatgttaaccgcaaagaatacgctattattaatttaaatgatttaaacagatttgatgatggtagtgaagtaactatcgacacattaaaatcatcaggtttagttaaaaaagaacttgcaggagttaagttgttagctaacggcgaattaaaggttaagttgactgtaaaagttaataaagtctcagaagctgctaaaaaagctgttgaagccgctggcggaactgttgaggtgatctaatgttctcgaccttgaagaacgcctttaaggataaagatattagatctaagatcttttttacactctttatcctgttgctttatcgtatcggagctaatataacagttccgggagttaatgcaaaagctattacacgggttgcacagactggtttagtcccaatgttggatacagtcagtggtggtggattagatacatattcaatcttttctttaggggtttcaccttatatcactgctcaaattgttattcaattactccaaatggatattgttcctaagttagttgagtggggaaaacagggagaagtcggaagacgaaaaacaaatcaagtaacgcgctatcttactttagtggttgcctttgttcaaagtctcggaattactcttggttttaacgttttaaccgaaatgggtttggttaaaacgcaaactcctcaaacctatattgagattgccattattatgacagccgggacaatgcttttgacctggctaggtgatgaaatcactgataaaggtctgggaaatggtgtatctgtaattatttttgcaggtattattgcccgtcttcctaatggaatttatcagctatttaaagatttcattattaataatagtgctagcgatcgttggcaagggattttgttcttcatcgcgatcattattgccattttactagtaactcaatttgttacatggtttcaacaggctgatttgcgagtacctatccaatatactcgtagagcagcaacaagtggctccgaaagtttcctacctttaaaggttaacgtttctggagttattccagttatttttgccagttcctttattattacaccagctacaattttgatggtttttcaaagatctcatggaaatgaacaatggtttaagatttgtaatcaaatatttagtttacaaaccacacctggtgcattaatttatacattgttaatcattttgttcactttcttctacgcctttgttcaagtaaatccagaaaagttggctgagaacttgcaaaagcaaggagcctacattcctagcgtttggccaggaaaagatacacaaaagtatgtatctaaaattttgattagattatcaacagtaggtgcagtatttttaggccttgttgccttattaccgcaacttgctacaaatatttttggtttaccaagttcaattggacttggcggaacaagtcttttaatcgttattggtgtggttttagaattagcccgtcaagttgatggactactaatgaagcgcgaatacgttggatttattagatagtaaggataaaaatgattaatttaattcttttaggtttgcctggtgcaggcaaaggaacagcttctgaaagcattgtagataagtatcacttggcacatatttcgacaggtgatatgttcagagaagctatggctaataaaactccagttggtttagaagctaaaagttatattgataaaggtgatttagtgccagacgaagttactgctaagttagttgaagaacgtcttaagcaacctgacactaagaatggatttatcttagatggatttccaagaaccactgttcaagcagaacttcttgaaggtataactaaacggttagaaaagccgttaactaatgtaattgcaattgatgttgatgaagatgttctaatcaagcgtttatcagcacgctacatttgtaaaaattgtggtgcaacttacaacaagatttcaaatccaactaaagtagaaggtacttgtgatcgttgcggaggacatgaatttttccaacgcgaggatgacaagccagaagttgttaaaaatcgcttagaagttaacaagaagatgaatactcctcttcgtgatttctatgaagaaaaaggaattctttcaactgttaacggtgaacaaactccggaaaaagtatttgaagacattgacaaaatcttaagtaaagattagtctcgtattgttttttttacattccgtgttataatgcctaagtgtgactatttgttcatgtggaggaacaattttggcaaaagaagatgtcatcgaagttgaaggtaaggtagttgataccttacctaatgctatgtttaaagttgaattagaaaatggtgcaacaattttagctcatgtttcgggtaagattagaatgcactacattagaattttacctggtgatagagtaacagttgaattatcaccatatgatttaactaagggtaggattacgtatcgttttattaagtaattacggaggcaaacatgaaagttagaccatctgttaaaccaatgtgtgaacattgcaagattatcaaaagacatggtcgtgttatggtgatttgctctgcaaaccctaagcacaaacaacgtcaaggttaatagttatatatttttattaggaggtgcaatttaatggcacgtattgctggtgttgacttacccagaaataaaagagttgtagtcgcattaacttatatctatggtattggtgaaccaactgcaaagaaaatttgtaaagatgctggtatttctgaagatattcgtactaatgacttgactccagaagatcaagaaaaattacgtagcgaagtagataagtaccgtgttgaaggtgaccttcgtcgtgaagttagtcttaacattaagcgtttagttgaaattggttcataccgtggtattcgtcaccgtcgtggcttaccagttcgtggtcaaaataccaagaataatgctcgtactcgtaagggttcaaagagaaaataatttattaaataggaggttaagttaatggctgcaaagaaaacagcacgtaaacgccgtgtaaagaagcatgttgaaagcggcgttgctcatattcattctacgtttaacaataccttggtcatgattactgacgtacaaggtaacgcagtcgcatggtcttccgctggtgctttaggtttcaagggtagtcgtaagtctacaccatttgctgctcaaatggccgcagaagcagctgcaaagtctgcaatggatcaaggcatgaaacatgttgaagtttcagttaaaggaccaggtgcaggtcgtgaagctgctattagagcacttcaagctgcaggtcttgaaatcactgctattcgcgacgttactccagtgccgcacaacggttccagaccaccaaaacgtcgtcgtgtctagtttattcctgcgtgcaggacattacgttttgaaaggggcccagtaatgattgaatttgaaaaaccaaatattaccgtagtagaccaagaggaggcatacggtaagtttgttgtcgaaccactggaacgcggtttcgggactactttaggtaactcactccgtcgagttttacttacttctattccaggtacggcactttcttacattcagattgatggtgtgttacatgaattttcaacagttcctggcgttagagaagacgtcacaaaaattattcttaatttgaagaaactagagttaaagtcactctcagatgaagaaaaaattgctgaaatcgatgtaactggtccagcaatcgtaactgctgctgatttaaaggtcgactctgatattgaggtcttaaatccagatcaatatatttgtagtattgctgatggtggccatttgcatatgaacgttgcgatcaagaatggtcgtggttatgttcccgcaagtgaaaacaagacagatgacatgcctattggcgtcatccccgttgattcactcttttcaccaatcaaaaaagttaactaccaagttgaaagtgctcgtgttggtaaaagagacgattatgacaaattaactttagaaatttggactgatggttcaatcacacctaatgatgcccttagtttcgctgcgaagattcttgtagaacacttcaaagtatttatgtctactgatatggatgcgcagtttgatgatgtaatggtagaaaaagaggacgataagaatgagaagaagcttgagatgacgatcgaagagcttgacttatctgttcgttcatataactgcttgaaacgtgcaggaattaatactgttcaagaattaactgataaatctgaagcagatatgatgcgcgtacgtaacttaggacgtaagtcattagaagaagtaaagaataaacttgccgaacttggtctatcacttcgtcaagatgactaagttggaaaaataaggagggaaaactcatggcataccgtaaattaggtcgcgatagtgcacatagaaaagcaatgcttagagaaatgactacccaattaatcatgaacgaacgcattgttactactgaaacccgtgctaaagaaatccgtaaaactaccgaaaagatgattactttaggtaaacgcggtgatttaagtgctagaagaaaagctgctgcttttgttcgtaatgaaatcgctgatattcatgaagagaaagatgcagttgttgtaaaatcagcacttcaaaaacttttcagtgacattgcacctcgttacaaagaccgtaatggtggttacactagaatgtacaagttagctaccccacgtaagggtgatgctgctccaatggtaatcattgaattagtttaattgcgtaaaatataatattattattttataaatctttcacaaaagcgagaataagcgtgatgatggtggcttttgcctagtctagcttagatgttaaatcatccctctttgtggatgatttttttttgctcttttgttataattgatacaacgacatatttgaaaaagagcaagtgatatttatgaaagataatatagtaaccgtagagcatctttcttttacttataaggatagtgaagaacctgcagtaaaagatgttagtttttcaattcctaaaggaacttggaccactttggttggtcataacggaagtggcaaatcgactattgcgcgtttgttaaatggtattcttttaccagatgataatcctgagaccttgattaatatcgatggtattacgctgactgaaaaaactatgtgggatattagagatcgtgtgggaattgtatttcaaaatcccgataatcaatttgtgggagctacagttgaagatgatgtggcttttggtttagaaaatcgtcaggtacctcgtcctaaaatgaaaagtattgttcaggatgtacttaatcaagtcggaatgacaaattttcaaaaaagtgaaccgcaatacctttctggtggtcaaaagcaaagagttgctattgcaggaattttagcaattggtccaaaactgataattctagatgaatcaacgagtatgcttgatcctgcaggaaagttcaaaattcttaagcttataagaaaattacaaaaagaaaatgaactaacaatattttcgattacacatgatattaacgaagcagagcacgcagaccagattttagttttagataaagggagcttgctagctagcgattcgcctgtagatatatttaaagatgtgtctcttattaaaaatgcagggttagaccttcctttattttataaaataaaaaataagctgataaataaaggaataagtatcccacaagaagtcaatactgaggaaaagttggtgaaatatttgtgtcaattgaattcaaaaatgtagattatatttatgctccgggaactccgtttcagactcaaggattaaccaatatatcctttaaaataagaagtggctcatttgttgcaattgctggtcatacgggaagtggaaaatctactttaatgcagcattttgatggcttattattgccaagtaaaggctcagttaccattgccgataagagtataatttccaatacttccagcaagtctttaaaagaaattagaaaaaaagttggtttagtattccaatttcctgaaagccaattgtttgaagaaacagttcttaaagatgttatgtttggaccgcttaattttggcttttcagaacaaaaggctaaagaacaagctattcagtggataagaaaagttggtttatctgaacaagtcatgaataaatcacccttcgagctttcaggcggacaaatgcgccgagtagcaattgctggcgtaatggcgtatgaaccagatattttgtgtttagatgaaccagctgcaggcttggatcctgaaggacagaagcaaatgtttgacatatttaaaaattatcaacgggaaggacatacagtcattttaatctcgcataatatggatgatattagtcaatatgtagatgatatgttggttcttgagcatggtcatttaataaaacatgcaagtccaaaggaagttttttctgaccctgactggttaaaaaaacattttttagatgaacctgctaccagtaaatttgctagaaaattagaaaaaggtggctttcaattttcagaaatgcctttaactgttgattctttagtcaatcaaattacaaccaaattaaagtcgaagggaggaaatgaatgagtaagattattatcggtcggtatatacctggaaattccattatctataagatggatccaagaggaaaaataattgctacctttttatttattgtcattatcttcctagctaataattggttatcctatctctttttatctttttttactttacttgctgttggagcaactaaattaaaaccaaaagtattttgggatggtgtgaaacctttaatttggctgattctttttacatcagttttgcagctattttttactactggtggaaaagtttactggcattggggaatttttaacattagtgaatacggtattcaaaattctatttttatttttattcgttttgtaatgattattttaatttctactgttctcactctaacaacaacttcgttagaaatagcagatgggatggaatggctcctaagacctcttggatacttaaaagttcccgtagcccagattgcgcttgtaatgtcgatagcacttcgctttgtgccgactttattagatcaggctgttagaattatgaacgctcagagagcacgtggagcagattttaatagcggtggattaattaaaagaattcatgcaattattccaattttaattcctctattcatcagttctttaacaattgcaattgatttagcaacagcaatggaagctagaggttatcgagaaggggcaaaaaggacgcactatcgtgttttaagatggtcaaagtatgattgggttaatctaggatattttgctctcctgacgttaattttattacttacaaggacatattaaatgatgactacgagatataagttgacaatggcatatgatggacacctttttcatggctttcaaattcagccaaacgaacgaactgtgcagtgcgtgattgaagaagctttaaaaaagatgacgaagggaaaaagagtagtagtgcatggatctggaagaactgatgctggtgttcatgctaaaggtcaagttatccactttgattatccgggaaaagaaatcccagctaaaaatatgatgcttgctctcaatgcattaatgccaattgatacagttttctttgatagtgaaattgtagattctgattttcacgtgcaatattcaactaagggaaaatggtatcggtatatagttgatcagcaccgttttactgatccttttaatcggttttacactggacactatccatatccgttagatattgctctaatgaaaaaggctgctaaagatttgatcggagaacatgatttcactagttttgcggcaagtggtggtcaaattgttgataaagtgcgaacaatttattatgtaaatattacttctgacccagataataaaaagattatttttgattttattggcaatggttttttgtataacatggttagaattttagttggtactttactggaaattggtaataaaaaacgtccagttgatgatataccgagagttttagcagcaaaagatcgacaagaagttcgtacaacagcaccagccagtggattatacttgcaacatgttttttatgaagaagttcctaaaaaatatcgattagaccttaaaaaagattgactttttgagcaaaacgacgtaaattagtatacgtatgtttgtccacgataggccccggaaacttattgtttgtcaaacagaagaaaaacggaggaatttaaagtgcgtactaccccattagctaaaactagtgatattaaacgtaagtggtatgttatcgatgcgactgatgtttcacttggtcgtttatcaactgctgtagcatcaattttaagaggtaagaataagcctcaatatacaccaaatgtagatactggtgattatgttattgttgttaacgcaggtaaattaaagttgactggtaaaaaggcaactgataagatctattaccaccactcagattaccgtggtggtttaagagctactcctgccggtgaattattagctaagaacccagtaagattagttgaattatctgtaaagggcatgttgccaaagaatactcttggtcaccaagagttcatgaagatgcatgtttacgctggtgaagaccacgaacacgcagcacaaaagcctgaaaagttagacatcaacgaattaatctaggaggttttaaataatggcacaacaagcagcttacgctggaactggtcgtcgtaaagattctgttgcccgcgtacgtttagtaccaggtaacggtcaaattaccattaacaaagaagacgtaactaagtacattccataccctaacttggttcaagatatgaagcaaccattagcattaactgaaactgaaggtcaatacaacgttgaagttaatgttaacggtggtggcttctcaggacaagctggtgcaattcgtttaggtattgcacgtgcacttcttgaagttgacccagatttccgtggtccacttaagaaggctggcatgttaactcgtgacccaagaatgaaggaaagaaagaagccaggtttgaagaaagcccgcaaagcttcacaattctcaaagcgttaatatttatattacgttttatacaaaagacatctcgcaaggggtgtctttttttgataggtataattattcaatataaaagtattatgtttttagagagttaaaattaataatagggaataaagatgattatatacactagatataaatttaatggtgaagtattattttcaagatttatcaattttgaagagataatggatcgtaaatatagttgcttaggacaaatgactcgagtaactataaaaggtggaaagacttatgagggttttgctgatgaaccttatttgtcaaataaaggtaaatgcttaactttaatatggtatgatatcgactatggcactttagggttaagaagtggtaaagtaaccacaatatttataccattagatataattattggaattgagtcaattttgcatagtaatccacgttggggacatccaccaattaatgaatttgtttttagtagtgaattaagatcaagattaatgaaactgcatgaaaaatatatgcaaagtgaagaaaaaagtaggccaaaaaagatatatttaaacttcgattaagaaattgtgaaagttttgaactataataatatagacaaggtatcctaagaaaggttctatattatttacatgaaatatttaattactggagcaacaggtaacttaggtgaaaaggttactcgttggcttagaactatgacttctgaaaataatattcgggttggaattcataatttaaaaaaagcgaataagtttgatgatctagctgttgaaaaggttaagctagattactttgatttagatactcttcaaaaagcagtttctggcgttgacttggttgtttatattcctagtcttacttatgatttgcaaaaaaggattacagaatttgaaaatgtgttgcaagtagtaaaaaatgcaaaagcaaaattaatttttgttagcttttttgcggaccaagaaaataatccttttgtgatgtcgccattttatgcttatgtaccaaggcgattagctagctcaaatgttgagtatagtattgtgaaaaatagtctttatgctgatcccttagttccatatcttgaagaattaattaagcgtaagaacataatttatcctgttggtacccagccactttcttttattactcgaaatgatagtgctcatgcgattgcttgcttatctatgcaacctgtgatgcgtgatcaaggtcagacttatttactaagtatggataaaaattataatatggttgaattgtcctatattatgtcacgaattactgatcataaaattggttatgcaccggtcacaactactgaatttgctaaaatttatgcccaagaaggcgatggaaaagaattagcatcaatgtatgctggtggtgcaaaaggattattaagcgcaacatcagacgattttcatcgcttaactggacgtgagccggaagaggtggaacattttttgcgaaatggttatcaaatagctcgtttgtaatttatcatatatttgtgcatagtatttcaagttaaaataaaagatgttatactatggatagtaagtgctaagagaaaattaattgtaattaaagtgtagatgcagagctgagtaagaccgtaggcatgtttttgtactacacggatttttagcttagggatgaggttaaaagtcaacttttaactgctatatacgaaaaagagatcagacattaaaatctgatctctttttcgttagatttattagttaaagactagcgtcaatatttttagctaagtagtcgtaaagcatacccttttctaggtcactggtatcgtgcccaagcgtccgagcaatagtgtaagcatatgcccaagcagtagctggaccacggctagtgataatcttgtgttctttatcaacaacagtaatatcagtgctaaagtgaccgtttggacattcttcttcgatttgtttttcaaagcctggataacaagtgtagttagcaccttctaataaaccatagtgccctaaagcaattggagctgcacacattgcggcatcccacttgccagccttatttctttgaatcatcaagtctgcaagcttcttattatttcttaaattcaaagctccagttctgccaccagggaaagcaacaagatcataatcaagaagtgaatcatccacaactttatcacaagtaagcaagatatgatggtcaccatcaatttcttttttatctagaccaaccatgtcacagtcaatatttaaacgacgtaagacatcaacgacacttaggccttcaacttcttcacaaccgtctgcaaagacaacagctacttttgtcataaaaaagtcctccttttttagtaattactatacattccttattttaacgcaatgacttgatctttttttatttgaggattgaaaaaattaactaaaaattgcgtatataaatgtagaaaggaaaatgaaggaatgggtgaggatcttgtagtagaaaatatgtgaaacactaaatatagtattgattttaaaaatacttgaaataacgtagtattctgttaacattgagataattgtaataaaatttgtgaaacaatttaaggaaagagggtaaaaaatggctactgaagtttatttagtaagacatggagaaacgatgtttaatcagttgaataaagttcaaggttgggctgattctccattgactgtcaaaggaattaatgatttgaaggtaactgcttctaatttatcgcaggttcactttgataaaatgtacagttctgacttgaagcgagccattgatacggttcacttaattgcagatacaaatgaggtttcagaaattggcaaaataaagaagcttccagcctttcgcgaggtattttttggaacttttgaaggcgacgatattgatgaaacttgggaaaaagttgcaaaagctggtggcatgaaaccaacgagtgatgtagtaaaaattattcagacacttgggatccatgatttccgtgaagctactaaaaaggctgatccccgtcatttagctgaagatgctgaggcactagataatcgtatggatcaagcaattaatcaattagcccaagaaactaaaggattaggaagagtattagtagtatctcatggtgattttattaagactttagggattaaatattgggatcaagcaagtggtgatcatgatatcccatttcctgataatggcagcgttactcgcggaattattgacaatagtggaaaatttagaattattaattatggtgtcaaaaatactgatattccaaatttataagatgtaactatttagttgcatcttttttagtataggttagagggatgttctttagcagtatgttcaacatgctcaatcattgcgtcaatcattgataagacgtcaggatcgtttaaaaagtaaaaaacatgtgtcccatgcttatgatgtttaactagattatacttttctaaaattcctaattgctttgacacgacgggttgagctagttcaagtgtagttgcaattgttgaaacatcgacttctttagaagaattacgtaagaaaaataaaattgagattcgtctgctattactcaaaaccttgtatatcttagctgcttcgttaactagggatgtatttaacctcattatgatcaccaaacctcattgacaatatatcgaaaatggaatattatactttctgcatataagtataccaaattcgatatatttatggagaaaaaacatgaaagataaatcatcattacgttatttttgggtaacactattaaatattattattacaattgctgaatttattggtggggcaatttctggatcgctagcgttgttatccgatgctgtgcataacttaagcgatgttggttcgatagttttagcctttgtcgctaatttaatttctaaaagaaaaagaaacaccagcaaaacttttggttatgatcgtgccgaaattttagcagcctttactaatggaattattttaattgtaattagtatctatttgtttattgaaggaattcaacgtttcagccatccagagccaattagaggaatgattatgttgattgtttctttaattggtctagcagcaaatgtcatttcgatgtttgtagttatgaaagaggctaagacgagccttaatgctaaagctacttttttaaatatgctttctgatgcaattactagtgtagctgtagttttgggcgcaatcgttatttcaatttggaaaatttactggattgatccagtgttaacaatcgctgcttcggtatttttactcaaagaagcatatgaagtaacaattaaggcagctaatattttgatggaaacaaacccaagcatcgatttaaacaaggtaaatgagctagtcttgtcttgtccacatgtgaataatattcaccatgtccatgtctggcaatattcagataatgtgacaatgcttgatgctcacattaatgtggataagaacctggacgctgttcagctagaaaaaatttatacagaaattgcggaaaagttaaaatctcttggaattaatcatgtaacattgcaagcagaatgtactcgcggaattgatgataagatgatttttgcagataaagaagattagttattctggttttgctgctatttggtaaaataggggcaaagccttttatttttatggagaaaaaaatgaaattcgatacagatgacttaaaagaaagcctaaaaaattatcaacaaaaagctagtgatcaatttaaagatttcgctgaaaacgattggcctgacattaaagatcatgtgaccgaaaaaggacaacaagcgggcgactatttgaagaaaaatggtggaaaagtttatcaaaattctgttaaagcctttaaaaagggcgtcagagatcttgatcagtgggtaaacggaactagcgtacataaggacgataaataaaatgaaagtaaatatttgggtagctgtgattgttctaattgttggtttatgggacttgtactatgcttataatcgctatcaagaaaagaaagtgactaaaagaggtagtaaagcagatactatttcttttgcaattttagggacgatttttacaattggcggaattattatgctatttatgcattaggattaggtggtaagaaatttggttaagttggttttagttcgacacggagaaagcatagcaaatcgagataatgtatatactggctggaatgacgtgccgttgagtaaaaaaggaattgaacaagctaaagatgcagggctcaaagtagctaagattcctgattttgtacctactcatatccacacttctgttctgtcacgtgcaattatgactgcaaatataattgcggatgtttgtagttttctctatttaccaattactaaaacttggcgcttaaatgaaagacactatggagctttaagaggcattaataaagatgtttcaaaaaagatctttggtaaagaacaagtattaaagtggaggcgtggatttgatagtgtaccaccacttttaactcagcccgttcaagaccgcagatatcaaaagtatgatatgcgcttgatgccgcagggagaaagtttgcatcaaactcaagaacgattgatgccatatttttgggatcatattgcacctgagttaatgtctggtcacgatcaactaattgtagctcatggatcaagtctgcgtgcccttattaaaaaaattgagggtatcagcaataaagatattgtgaaggttgaagttccaaatgcagaaccaattgtttatacttttgattctgacttgcatattattaaaaaagaaattttgcactaagcgagtagacttttggtctgctccttttttaatagtttgtataggtatttttatggtaaaattttttacgagtatatttgaacaaattcttgtagagtaggagaaaataatgcgtaaaatatttttattaagaggagcaccaggatctggaaaatcttcctttattgctcgtcaccacttgcagccttacgctatttctcgtgatgaaattaggctgctcttggcggatttgacggtctattatgaagagagtactgaccatttgcaccaagttattcctcgtcatgtaactgtgcgtacagagcagatggttgataatttggtccaacataaaatggcctatggcgaaactgttattgtcgatggcacacatatcacacctgataaaattgaacattttcgtccttgggttgaaaaatatcgctatgaactatctgtagttgatttaatgcaaaataatagcttagagagcttactgcgcagaaatcaaactagaatgcactatgattgggttaagcctgacgtaataaagatgatgtatgagcaatatgaagctaacccggaagtaccatcttgggcatattctattttgcctaatggaatggagcgagctttaagtcaaagagaaaagaatctagatcattattcacatgtggtttgtgtaccagataaagttaagccagaagatttcccacatgttcatatttctaatttctatttttcttttaatgatgaatttactagaaaatatggaacttatcgaaatgttattaccttaggtaaaactagggatgaagttattgaacaatttagacttccatattttgtgtttaagttccaccacaagcatttcttgatttctgcatatccaattcgaaatgaaatgttagatcctattcgaaaagtaaaaggagtttggtcttactcgactgggttatataatgtagctgattttgtcaaagaatttccagaaaatgaacatcaacatgttcatcaatttaatttaagtaagattgaccctactcgtttattgcatatttggtagaaaaaaacacttcaactgtaaaagatacagtttgaagtgttttttgtctgttttaaaatttatactaataattcttagctaaagcacccattggatcccaaggaagtaattgaattggatctttgcttccttcttcaaatgctttcttcaagtcgtcgctaaggtatttcttgttgataactgcttggtaaacaaatttatcaaaccacttatcactcatgacaaagtaacctttaaatcctggtttttcgccccatgagttttcaatcttccacttagttggtttgccatctactaaatcaacaccagttataaccatggcgtgatccatcatactttcgcctgaatcaagcatatcagcttttgacatattaaagtcaacatcaaacagatcatcgcgcttgtacaattcggtgtctagtaaaccagcttgacgttcagagtctttaacaacatttgaaccaaaccaaacaacttcaccatttttaagttgcttgataattaagtctttcatttcatcaactggtaaattcaagtgacgaacttgacgaccgccttcaacgtttcctaagtattcaacagaaaataccttgtggaaaggcttatctttagttggtgcattaattgtggaaatatattgactcaaatcccagttaacatatttcttaaagaagtcttgtgggctcaagtcagcatctctgtgatagttgccatcgtcgtctttatattcaaaattaaatttcttaggtggaacaccgagagaaatggctaaaatacggtaaacttcacgaagcatttcattcttacgtgcttgaacttcatcttcgctcttcccatcttgaaccatcttacgtaattcaagaccatcttttctaagcaaagtatttaaagtatcgtttaaagcactagaatttgttgcattggcagtttctggataaactttctttggagcaataccgtatttttcaataattccgcaaagcatgtcccattgaccaccatcttgttgtggagtagtgaataagaaactaactttacgatcgcccaattctttgtcggctgtagcgataacattttcaaagaaccagtttgatttttcaaatttatcccagaagttagtgtagttttgagataattcaaaatccttaattttgaaattcttttgaatcgaatgacgcatagtatttaaagcactaaacatccagcaacgaccagattgtttttggttagcaactttaccagtgtcgatttcaattgaaaaagttgggtctaagttaattttagtttgtaaattttgactagctttgaaaatgccgttttcttgagcagctcttgcagcaattttgtttgctttacttgagttaaagtcattttcaaaatcattgataagatcatttgtaatttctttgctcataaaatcctccttgattaaaaaaagcttaattctattttagcttaaattaaagatgaacgtctagtgattgaacaaaagaatatctaatcataaaatttattaaaaaaataaatgatttttttcgtatatataattagggacatcttacgagaattaacgtaaaatataggtctaggaaaaagaggggaaattaatgaaaaaacgtggttttgaaatagtatctaaataccgtaatgctggcttacacttgccgcaaagacaaacaattgctagcgcaggatatgattttgaatgtgcacaagatatagttttaccatcaatttggtgtatgaattttgttagaatttttagattaattagaaatagtcatgagctaaatgaacgagaccttgaactagcagaaaaagttttaaagccttttttagtaccaacgggaattaaagcatatatgccagaagatgaagttttgattcttgctaatcgctcgtctaatacatataagcgtaatgttactttgccgaatggtatcggagtaattgatagtgactattataataatgaaaaaaatgaaggtgagatttacttccaactgattaattacggagttcgtccactaaaaattaagaaaggcgagcgaattggtcaaggaatttttatgccttatctgaaagctgataatgatgaaccagttcaaagacaacggcttggtggattcggctcttctggaacaaggaatgaggaataatggcaaaagttaaaacccgttacaagtgtcgcaattgtggttatatttcagcttcttatttaggtagatgccctaactgcggtgcttggaatcaatttgaagaagaaacgcaagaagtaaaaaaagtatcaactaaggcaacggccagccgtttaatgactaaaattggaaataatgatccagtaaaattaaatgaagtaaaatctgaaaaagaaaaaagaattgtaacgccgtttgaagaattaaatcgagttctagggggcggaatagttccaggttctttagttttaattggtggagatcctggaattggtaaatcaactttgatgctccaaattaccggcgctttagctaaagagcatagcgttttatatgtttcgggggaagagtcggctagtcagataaaaatgcgagctgaccgtctaggtgtaagcaacagcggaattttgctctatcctgaaaccaatatgcagaatattcgtgaacagattgatgagattaagccggattttttagtaatcgattctattcaaacaatgaatgagccatctcttgattcgatggtaggatctgcttctcaagttcgagaagttacgagtgagttaatgaaaattgctaagaatgatcagattactacttttgttattggacatgtgactaaagaaggtgctattgctggtcctaagattatggaacatatggttgacactgttctttactttgagggggatggccaccattcatatcgaattttaagatctgttaaaaatcgttttggggcagctaatgaaattggcatgtttgaaatgaaaaatgaaggactaacagaagtgaataatccttcagcaattttcttagacgaacgcttacccaattctacagggtcagcagttgtagtttcgcttgaaggaacaaggccacttttagcagatattcaggccttggtaactccaactgcctttggctatgctaaaagaactacatcggggttagatttcaatcgtgtagccttattattagcggttttagaaaaacgtggtaacctaatgttgcaaaatcaagatgcatttttaacggcaacaggtggaattaagttaaatgagccagcgattgatttggcaatctgtatggctgtagcttctagttataaaaataaagaaatttctgctactgattgttttgtaggtgaagttggtttaactggtgaaattagaagagttaatcaaattgaagctagagttaaagaagctgctaaggtaggctttaagcgaatttttatccctaaacataatttaactactgagcttaagaataattctgaaattgaagtaattggtgtagcaagtctgccacaagctttaaaactggtttttaattagaagatagattgaacttttgctcgttaaaagttacacttaaatggatgaattttaataaattttgaaagaggcgctttaattttggcaaaacaaaaaatccgtgttcgttacgcaccaagtccaacaggtcacttgcatatcggtaacgcacgtactgcattatttaactatttatttgcacgtcataacaaagggactatggtcttaagaattgaagatactgaccaaaaacgtaacgttgaaggcggttctaagtcccaaattgagaacttgcactggttaggtattgactgggatgaaggtcctgataagggtggcgactttggcccttaccgccaatcagagcgtaaagatatttacaataaatacattaagcaattaattgacgaaggtaaggcctactattcatacaagactgaggaagaactggaagcacagcgtgaagaacaacgtgcaatgggaattgctcctcactacacttatgaatacgaaggtatgaccgctgatgaaattaagcaagctcaagcagatgcagaagcaaaaggcttaaagccagttgttcgtatccacattcctgaaaatagaacttatgcttgggatgatatggttaagggtaaagtatcatttgaatctgatactattggtggcgactttgttatccaaaaacgtgatggcatgccaacttataactttgccgttgtaattgatgaccacttgatggaaattactcacgttcttagaggtgacgaccatgtagctaacactcctaagcaattagtagtttatgaagcacttggctgggaaccacctaagtttggtcacatgactttaatcattaactctgaaactggcaagaagctttctaagcgtgatgaatcagttcttcaatttattgaacaataccgtgaccttggttacttgccagaagcaatgtttaactttattactttgcttggttggtcacctgttggtgaaagtgaaattttctcacaaagagaattaattaaatcatttgatcctaagcgtttatctaagtcaccagctgcttttgatcaaaagaagcttgaatggattaataaccaatacgttaagaaagcagatcgtgatgttttattagatcttgctttgaataacttacaagaagcaggattaattggtaaagaagtttcacctgaaaagatggaatgggttcgtcaattggtaaatatttacgctgttcaaatgtcttacactaagcagatcgttgatattactaagatcttctttgaagaagctccagaattatctgatgcagaagtcgaagaaattaagaaagacgatgctcgtcctgtaattgaagaattcaagaaacaattaaatgcaattcctcgctttactgctgttcaagtaatgaacgcaattcaagctactcgtcgtgaaactggcgttaagggtagaaaattatttatgccaattcgaattgctgctactcgttcaatggttggacctggtatcggtgaagctattgaattaatgggtaaagaaaaagttaacaagcacattgatttaactttgaagcaattaagcgatttaggtctttaattatttccaataaagttaaagctacgtgaaagcgtagctttttttgttagaatatactaggaaataaatgtcttaagtgaaagaaggatgatcatgaaggtctttaatactttaactcggcaaaaagaagagtttaagccattagtagctggtaaagtaagcatgtatgtctgtggaccaactgtttataactatattcatattggaaatgcccgtagcgtaattgcatttgatacaatccgcagatattttgaatatcgtggctatgacgtaaagtatgtttctaactttacagatgttgacgataagatgattaatgaagcccgtaaagaacatacgactgtaggagaacttgctgaccgctatattaaggcttttatggaagatacagaggcattaaatattgagccagctactcttcatcctagagccactcatgaaattcaagaaattattgattttgttcaagatctaattgataagggcttcgcttatgaagttgacggggatgtttattatcgtgctaaaaagttccctaattatggtcagctaagcgatcaaaatattgctgaacttgaagaaggtgcttctgaacacattaatgaagaagagcaaagtaagaaagaagatccaattgattttgccttatggaaggctcaaaaagaagacgatgaaattgcttgggattctccatggggtaaaggacgtccgggttggcacattgagtgttcagttatgtccaccaaatatttaggtgatacgattgatattcacggcggtggtcaagacttagaatttccacaccatgaaaacgaaatcgctcaaagcgaagctaaaactggtaaaaaatttgttaattattggatgcacaacggctttgtaactgtgggtaaaaaaaaagaaaaaatgtctaagtcactgcataattttgtaactgtgcatgatattttaaagcaaattgatccacaagttttacgtttctatatgtctagtgttcaataccgtcgtccaattaattattctgaagatggtttaaaacaagcagagacggttcttaaacgttatcaaaataccttgagaaatcttgacgctcgcctaatggatgagcaggagactcttgaagacagtattttaagggataatttaacgcaggcaaaggctgagtttattgaagtgatggatgatgattttaatgttcaaaatgctttgagtattatgtatgacttaacttcaaacttaaatacgcatcttcaaaaaaatcaagtggataagcctgctttaaaaaaggccaagaaattgttgcttgcttggcttgaaatttttggtgttagtttcaatgaaaagcaaactgaaaatgatgacgagatagaagttatggttgctaaacgtgatgaagctcgtaaaaataaaaactgggctgagagtgatcgcttaagagatgaattacaagcaaaaggtattgtaattgaagatactccacaaggaacgaggtggcatcgtgcttaaaccaaaggtactgacagagaaaaagaccaatccagatagcctaggaccgcttaccttagcttatttaggggatggagtgtatgaagtttatattagacgccacttggttaagggcggtattgtaaaaccacaaatgcttcaaagatatgcaacgcactatgtttcagctaaagctcaagctggtttgattacaagaatgcaggatttaaaaatgttagatgaagctgaattagcggccttcaagcgtggaagaaatgctaaaagccatacccatgctaaaaatacttcaattaatacctataagttatcaacaggttttgaagcaatgtttggctatttagatttactaggtaaaaaagatcgtgttgatgagctagcaaattggtgcattgaccaagtagaacagggaggattagacgactatgagttcgaataatgatgaatttgtgtatggacgtcatgctggaatcgacttcttaaagacgcaagatgctaacttaattaataaggtgtttttacaaaatggcgttcaagaagaatttgctaatcaagtttatcaattagcacgtaaaaagaatttagttgtgcaaaatgctcctaaaaataaattggatcaaatggttaatcatgaaaaccatcaaggattagttttaacagtggctccatttgaatatgcagatttagatgagcttcttgataaatttgatcaagatgggaaagatccctttattttaatgcttgactcaattgaagacccccataatttgggttcaatcttaagaacttgtgatgctactggtgttgatgctgtaattattcctaaaagaagagcaactggtctaacttctgttgttgctaagacttcgactggagctattgattacgttcctgtagctcgagttaacaatttagtgcaaactaccaagttacttaaaaaacgtggttactggattttcggtactgccatggaaggtgaagattaccgtaagtggaacgctaatggaaaaacagttcttgtaattggtaatgaaggtaaaggaatttcaccccttctgttaaaacaaatggatcaaactttaacgatcccgatggttggccatgttcaatcgctaaatgctagtgtagcaactggtgttttactttatgggatgtttaatagccgtcatccagaaaaataaaaatgcaagaaaacgcttgcacatattaactgaacctgatatgataacaattagtaagagattgaaaaagtagattgttactattgaattaggcgagactactgaataactctaactagcagtacgctagtgggtttattcagtagtctttttttatccttttttaaggaggtgggagagttgttgttgatcaagcgcgtgtttaataataactcagctttggttgagctaggcaataatcgtgaagcagttgtatttggaaacggaattgctttcaaaaaaactgaaggaaaggagatagatacgagtaaagttgaaaatattttttatcttgaaaatagtgcaacaaaaagaactattttttcgttattaaagaatacaccaatagatattgctgtaactactatgcatgtcgttgatcacgcatataaaaaatatcactatgaattatttgattatttttatctgtcattgagcgagcatattttaggagtttatcatcgaattttggataatacttatcaaacaagtcaaattcctgatatcaaggatgaatatcctttggaaaataagattgctcaagaaagcgtaaagataattgaacgggatctaaaaattaagctacctgtatcagaaagaaaaaatattatgttgcatttaattaatgcaaggattcctgaaaaaaagcaggtcaatcgagaaaaaaatatgatcaatatcgaagaaatgctgcacatagttcaggtgatccttgatcaacataatatttatcgattagctagtaataatgatgaatatgagcgttttatgattcatttgcaatatctttttaggagattagagcagggggaaaaatttcgctcatcggatattactaagaaagtaaaggatgaacttatatctgaatatccagaatcatttgcagtagtaaaagaaatagatgaacagctgaagcaagattttcaatgggaaatatcggatgaagaaaagctatatttaattgttcatattcaaagaatttatgagaaaagttcaaaatattaggagaaaaaaatggttagtaaagaagaaatttcgatggttggatttacaattgttgcttatgctggagatgccaaaacagacttgctaaatgctcttaaattagcacgtgaagggaagtttgaagaagctgaaaaactgatcgaagaagcaaataattcattagttgatgcgcataatgcacagactaagttaatgagtcaagaagctagtggtgaagaattagaaacaacttttattatgtctcatggacaagatacattaatgactacaatgcttttacgtgatgaagtgaaatattttattgatttgtataagcaaaatttagctttgcgagctgaaattgagcagcttaaagaaaaaatgaactaaataaatggaggagtagaaatggatgggttggtaaaaagaattgaaaaagcgcagccattctttagaaaagttgcgactaatcaatatttaagagcaattcgtgatggcttcatcgcgttagttccaattattatcttttcaagttttttcttgttaattgctaatgtgccccaaatttggggatttgtttggcctaaaaaagtagctacggctttaaatttattttataacttatcaatgggctttttgtccttaatggcggcttctactgtagccaaggccttaactggaagtttaaatctaaagttgccaaaaactaatcaaattccagttgctggagttcaatatacggctcaaatttcctttgcatttgtggcaatagatactttattaaataaaggaaatttatatttagctactgatatgattgggactaaaggattaatttgtgccttcttagtagcatttattgtacctaatatttattatttttgttttaaacataatgtcacaatcacgctacctgatgtagtacctcaaaatattgcgcaagcctttaaaaatattgttccctttgctatagcaactactttcttttgggcatttacgttaatttttagagctttaactaatatgaatttggcagcttggataattaaaagtctaactccactttttactgcagcggatgggtatgttggattagcaattatttatggtgcaatggcgttcttctgttttatcggaattcaagggccctcaatcgttgaaccagcagttacggcaatctacttaactaatgttgaagcaaatttaagagcatttaattcaggaaatattcaaggcgctaatcacattttgtcacaaggaattcaaatgtttgttgctactttaggaggaactggagcaactttagtagtaacgtttatgtttgcctttttgtctaaatctaaacaattaaaagcagttggacgtgcatcaacaattccagttatttttggtgttaatgaacctattttatttggtgctccactgatcttgaatccaattttttttatcccttttatttttgcgccaattcttaatgtttggatctttaaaatttttgttgatgtgcttcatatgccgtcatttatttacaacttaccatggaccacgccaccaacattaggattgtggatgggaactggttttaatattttagctttattattaggaattttattactagtagttgattcattattgtattctccattttttaaggcttatgatgcttcaatgctagcccaagaagagaaaaaggaagagcttgaagaaaaagatgataaaaaatctgttgtatcatctgctgagcctaaatttaatgaatctgaaattccactaggcaaaactaaagatcaacaagcactaaatgttttagttttatgtgctggtggtgggacatctggaattttagctaagtcacttaataaattagctaaagaagacaagttacctttaaatgcagcagctgccgcatttggatcacatcatgatttaatatctggaatggatgtagtaattttagcgccgcaaatggataccatgaaagatgaacttgcaaaggaatgtgagcaaaataatgctcgtatgattaccactactggaaaacaatatatttacatgacgcaacatgctaatgaatgtttgaagctattaatcaatgatattaataaatgacggaggcagtatgtcaactttattgaaaagggtaaaaaagttacccaagggttttgtatggggtgcagcaactgcagcttaccaggttgaaggaaatacaaatttagatggcaaagggaagattatgtgggatgattatttaaaaaatcagggaaatttctcccccaatcctgcttgtgatttttatcatcgttatccagaagatttaaaaatagctcataatctggggttaaacgcaattcgcatttcgattgcttggactcgtatctttcctaatggctacgtaacagatgagccaaatgaagcaggcgttaattactatcatcgactttttcatgaatgtttaaaaaataatttagtaccatatgtgacattacatcattttgatagtcctaagactttgtttgatcaaggcgactggcttaatagagaaatgattgatgaatttgtaaaatatgcagatttttgttttcaagaattcgttgaggttgataattggtttacgattaacgaattaatttcgttagctatgtgtcagtatattcagggaatttttccccctaataagttatttgatgtttctgatgcaattcaagctcagcataatgaactagttgcacatgcaaagatagttaatctctttaaagctaaaggatataagggaagaattgggttaattcatgtgattcaacccgtttatccagcaacgaattcagaagcagatagacacgcagctgatttaagggatgcatttatgaatcgctttttattagatggaactttattaggtttttattctgatcgaacgcggcatttgatcaaagaaattttagttgcaaataatgctgaattacatattcttccggaagatcttgaaattcttaaacaagcaagtaagcagaatgatatgcttgggattaattattatcaaaatcaaaccggtgctagttatgatggaccaagtgaaacttatcataatggtaatggaaagaagggcagtagtgtttttgcttttcatggagttggtaaagatgtgcgaaatcccgccattccgacaacagattgggactggaacatatatcctgaagggctatatgacgtattaaaaagaatagcacatgattacccagactatcctgtgatctatataactgaaaatggaatgggtgcaaaagaagcgtgggatagttcgagagaatatcttgatgatgattatcgaattgattttattgaccagcatttagaagctatcttaaaggctcgaaatgaaggagttaatgtgcaaggatatttcctttggtctttacaagatcaattttcatggtcaaatggctataataaacgttacggcttaatttatgtggattttgctagtcaagatcggcacttaaaaagaagcgccttgtggtttaaggccctaagtaagactatgcaataataatttttaacagataagaaattatcgttctgaaattaggcacaaccttgctatacttgtatcccataaacattcgttcccttagaaaggattcattctttttttattctgattatcaaatagaaaaaggaggaatttcctgagatggaaaaagtgaatgaagtttacttgattagaagggtaaaagaaaagcaagatatgaaggctttacatgagcttttggatcgctaccggcctttaatcaatggcgctaaaatgaattttttcattcgtaattttgataacgatgactgggaacaagaagcgttaattatgtgttatcagagttgctgcacatatgatgaagatcgagcagataattttggtgcctactatcgaaccaaattctataatcatttaagatcgcttttaaggtatgaactagcccaaaaaagaaccgcttttactaaatcaatttcttacgacaatgtggtgcagaaaaatttaattaaagaagaagttgaagaaatgcatattacgcctcgaaaagaaatgtatcaaaagtttattgaaaagctttctgataaagaagtaattgctctaaaagtttttttaggagaattaacaatcgaagaagcaagtcagaaaacaaagtacagccgttatcaattattgcaagccaaggctcgctgcaaagcaaaaatgcgaaaagagttgttttaaattcgcatagaattaataaaaaggctataataaagattgtggaatttatttaggaggtaattttaagatggcagatgaagttattaagacagaattgttagaccgtcacatgaaggaagtttttgattggagcgactctgatattcctgttagagatgcactatgggactactttatggaaaagaatggtagagataccatgaagacggaaagtgacatgcttccgttcttgaaagactctgacgataagatcgaagccttcgtcaacgaaaatcttaagaagtaacatcacctaaaaacaataattctacgcaccgtggtcacgcattgtttgaccaccaaagaacaatctctagggattgttctttttttgtgagaaaatatattttaaaaagaaaggggcggaggaatggactatattattggaatggatattggcacaacagcaagtaagggagttttatatcaagaaaatggtaaaaagattgcagagtcaacaattccgtatcccttaattcaggaaaaagtggatcaagctgaagaagatccacaagtaatttttgatgctgtgcaaaagattatttttgacttaagtaaaaaggtctcaggaaaagtaaaggcaatttcgtggtcaagccaaatgcatagcttaattggacttggtaaagataatcaattattaactaatagtattacttgggctgataaccgcagtagagaagttgtaactgctgcaaagaagagtggattagctaatagtatttatcatcgaaccggaatgccgcctcatccaatggctcctgtgtataagctattgtggattaaagaagaacttccagagctttttacacaggtgcaaaagtggattggaattaaagaatacattatctggcgtttaactggaaaaatgatgacagatacgacaatggcagctgggacaggcttgttgaacctaaaaaatttatcttgggatgaagatttacttaagcaaattaatttagaaaaggaaaaactgccaaccttagataagccagagacagttgtgggaggaataatccccaattatattcaaaagctaggattaagtgatcagacaaaaattattttaggtgctagtgatggctatttatcaacaattggagttggagttttaaatgaaaaatcttttgctttaaatgttgggacatctggtgctgtgagagtaattgcgcctgaagcggtagttgattcagaaaatcgctttttttgttatccagtggataagaaacattatctattgggcggaccagtcaataatggcggtatagtatttgaatgggctagaaagacaattttcggtcctgatcagaccgctgaagattttatcaatgtggcagaaagtgttcctgctggaagcaatgggttgatctttcatccttacttaggcggagaacgggcaccaatttggaatgctcaagcacgagggtcttttattggacttaccagaaatcacactaagccgcaaatggctcgtagtgttttagaaggaattatttttaatcttttgggtgcagctagaggcttacgtgaaaaaattggtgagccagatgcactaagagtgactggtggctttgtaaagagtgactttataagacagttgattgccgatatttttaacttgccagtcattgtgattaaaaatgaccaaagtggaaccttagcggcaatgtttttagcacaagtggggatgaaaaaagaggcagatttagaaaaaatcgctaaaaaaattgatgggagcaaaatttattttcctaatcctaaaaatgtcgcagtttatcaagacatcattcctatctatcgtgaagttgagcatgatttagatcaaagttatgaaaaaatcgccagctttcaggaaaaatatcctaaattgtttgaataaagtaaaaatgatcgtttagtttttgtgctaagcgatcatttttgaatttatttcaattttttaatcagtcggccaatattttcactagtttgggctagatcatgtttgctgtccttgatcgcttgctttagatctttagcgccactttcggtcgcaaagatcgcatcaattggcccatatagttcgctaactttcttaccaatattaccagttagacagattacagtagagttcggtgcaacttctttggctgctttagcaactccatagggggttttaccaaactgggtttgaaaattagttgctccttcgccagtaaaaataaagtctgcattctttgttttttctttgaaatgggtcatttcaagtacggcttcaacgccagactggatagtagcatttgtaaaggtgagtaaaccaaagccaagaccaccagcagctccggcaccaagagtattttcataatttttattcagatctcttcgtgcaacagcagcaaaatgatgtaaattttgatctaacttttttaccatttcaggcgtagcccctttttgtggcccgaagacagttgaagcaccatttttaccagtaagtggattagttacgtcactagctaaaatgatttcagtatcttttagacggggatcaattttagaattatcaattctgattaactgacttagatttccgccaccgaatggaatgtccttgccctgcaaattaagcagtttaacaccaagtgcttgagccattccagctccaccatcattagtacaacttccgcctaatccgataattattttcctaatttttgcatctaaaactgttttgattaattctccaacaccataagtagtagttatcaggggatttttagttgggtcattaacatattgtagacctgctgcttcagccatttcgatgacagcagttttttggtcgcctaggatgccataatgcgcagtgactgaagtatttaaaggacctctaactaatttagtaaaaatttttccatttgtggcatccactagtgcttgcattgtgccttcgccgccgtcagccattggaattttaatgtattcagcagaaggaaggactttttttaggccagtataaatagaatttgcgacttcttttgcggtaagtgaacctttaaatgaatcaggtgcgatgataattttcatagatctaccttttctgtttaatgaaatctttttaataaaaaaggtgtaaactgtacaaccttaagtacaatttacaccttttgacaaaaatatctaaattatttaattatccctaaaatatcactgacaatttgttctggcatcaaatgatcacgtttataaatagatgcctttggctcgttatcagtgtattctttcttagcaccgtaattcttaaccatcatcttagttggcccgtaataacttgcgactttttgaccaaaaccaccatcgacgctgttatcttcaagagtaacaactaattcgtgatctttttgtagatcatctaaagtatcagtatcaaggtgagcagcagattttggattgattaaagtagcgttgatattttctgtcttgagtaaatcaactattttttcgcctaattgataaaagtcgcctaaaccaataattgctactttggaaccaggcttgacatcatacttgatagttgaataattttcgctaattggctgaccttcaggaagtgggttaactggagacttaattgctacgggatgctttctttgcttaactgcccattcaagcatcgactttaattcatttaaagtataggtgctaagtattcccagtttggccaatttgcgaccatcgtattgtcaaaaatacctaagtgagtcttagaagcagcagtaattccgccaccagctacaatcagtacaacaggtaaatcgttagctgcaacatcgtgagaaagttgatcatatgcgcgttgtaagaaagtggaattttcaaataaaattggcgtaatcccttccttaacagcaccggcagcaaaggcaacagattcttgttcagcaattcctacatctttgtagttcttaggatatttatctttaatctcacctaagccaaaaacgcctggaatagcagcattgattgcaagaatattttcttgattttcaatgtgcttctttaataaatcaataattacagtacttgcgtttggagtttttggtgcaggaacagttgttttatcggtcttaaggtcaaaaggaagaacccagtggtgactagcttcattttcaatggctggttcataacccttacccttgagagtattaatatgtaaaacgattggatgatcaatatctttaacttctttgaaggcatcgatcattgttttaatatcatttccttgaccaacgtatttgtaatcaagccccatagctgtgaatgggttgtcttcagcttgaccgtttgattcacgtaatttctttaaagcagtaactacgccaccaacattgtcatcaatagacatttggttatcattaacaacaataattaaattgtgcttttcatcagctgcattattgaagccttcaaaagctaaaccaccagttaatgaaccatccccaattaaggcagtaatattttcatgattacccatcatatcacgcgctctagccatccctgtagctaaggcaacagaagtagatgtatgacctactgcataatagtcatatggactctcatcgggatttgaataaggagttacatcttcgtacttatctggatcaagccaggcataagcacgacctgttaacatcttatgtggataagtttggtgagaaacgtcccaaataatcttgtcctttggtgcatcaaaaacataatgataagcaattgtagcttcgacaattccaaggtcaggaccaaggtggccaccttctgcagcatctttttctagaattagcgttctaatctcgctagctaattgttctagctcttttaagtctaattttttaagatcttttggattttcgattttgttcaataaaaattctggatgtttgttcataatttttcaccccaacataaataaaaaaagcttactcatttattgtaggtcaatgagtaagcttttactaatataaagttagcatagtgatctatatgtttagtctatactttcttctaatccttgagaggtggtttgtcttttaagagtcaagaatagcgcaataaaactaagggcaaaagctgctgagttaattgcccaaccgaagttgtatgagccagttgtatcaaataacagaccatttaagtaaacagaagcagacattgcaaaagccccagtcatgttaatgacagaaagaattgtactgtagtctttagcgccaaattcttcacgaatgaggtaaggcagagcaactaagcaaacaccttgtcctaatcctagaatgaaggcggatgcgataagaggcaagctagtcttgaagaaaatctcaccgctccaacctaataggccaaataaagagtagattaataaggttaggcgagtattaaagcggtcaagcataaaaccaatagaaatcttaccagcagcagctcccagcattactcctgatactactgatgcaccaattgttaaaggtagaccttgactagtaatatgtcctgaaatatgttgtacagaaccagaaacaaattgtaaagctagcattgcaaaggctaaagcataaaagactggggtctttaaagcagcttttagactaataccagtagtttcaagaactttttctggaatatttttaactttgccataagcatggtgttttttgtttggtttttcacgtaaaaagaatgcggtaggaactaaaataccaagaattagtaacccttcacaaataaaaccacctcgccagccaaaattagtaataatatcaccaattattggattaaagatagtaccaccgaatgcagaaacgccaagtgcaattcccataactgtacctaatttttcattaaaccaattacctaataagacaggaattgacagggtaatagcgatgggttggcaaattccaataatgatccaggcaatgtaaaaatgagttaagctttgcgctactgacaaactcagtatagaaatacaaattgcggtaaaacagaatgttaaaagccagcgtaagttaagcttggtcataattttaccagcaaataaaagcgtaatagctgctgccgcattttgcagagtggtcattaaagcaacacttgctcggccaacatggaaacttttactgattggctcaaagaagagaccgattgtattaactattagaccgaagccaactaatgaaatcaagcatgatgcaataaagacccaccatgcaaaaaagtgcgaagaattttgttttttgttcacttcttatcctactttctagagtatttattccaacaaaatattatatcgaaagtgaatgttagaggaaaagaaaagagcgtttttcttaacgctcttttaatactgtctttttaataatctacctgttaattgttcgatcaaagcccgattctcattatctggccaatgtttttttaaactagccagggctttttcagtatattgatcagctaacttttgtgctcgttccacgccgccaagatgattgaccaaattttcaatttcatgtaattgatcttgggttagatctttttctatttttactaattcgtgtaaatgattattgtcatcgttttgcagagcaaaaattaaaggccctgaataaataccatctttaacgtcaagtaagaccggttttttaaaagtagagcttgtagttgtatagtccaaaatatcgtctcttagttgaaaagcctgtcctaggtattccccaaactttttagcttttaatgctttagttactttaattccactttcataagcaccaataaaacaagctaaaccaaataaaacgccagttttacccttaatttggtctaaatattctttttcagaaatgtcgatattataggcattattatattgctcggtttcgccgactaaaatattttgcattgtttttccgtcagcaattacgctatgtaaactttgagcattttcgcttaaaagcgttagcgaaagggcaaataaatagtcacctgcataaacggcgatgtacttgccgtacttagtttgaatagatgggcgaccatgccgcatgctagattcatcaataatgtcatcatgaattaaagttgcattatgaagtgtttcaatagaagttgctattttctgaagctcgtcatgtttttgatcggcgtcaggaccaaatgcgccaaagagcattacacaagcaggacgaagcatttttccaggaacagcgaaggtatcttctagtgcttgccctaataagccgggaacgctattgacgtgtgttagaataatatgactaatttcgatcatatctttttgtacttgagggaaactatcccaaaaagtgaatttgtttttgatattatttcttttttctagcatagtacaggtaattgaaagactaagttattaacttgtcttttgtctttgatccttccagtcattgaatattggttataagagtagtcaaaattaataaaaataaagtaaattgaagcaaataatgttattttttcgcaatattttttagttttaattattaagaactagaagatatagatctaaatagataattataaaaaatgcgatatatcaagacttgctaatcgttataattatataaaatatctttatttttacttaaataagatcttataatatataattttacactatctgggatcattatttaaaagtagatattgattttttacgatatataattatcttacactttactttatagatagtaattgctaaaataacatttttttgctaagataaatgcagtttaggagtggttttatggcagtaaagaaagcagctcttgcatgtactgtatgtggctctcgcaattattcaattgcagccagcaagaatagaacgcaaagacttgaacttaaaaagttttgtaaacactgcggtaagcagactttgcataaggaaacgaggtaggtaagcgatgtttaagttttttaagagtgttaatcaaactatggcaaaggtatcatggccaacttggaaacaaaatagacgtgatactggtgtcgtagtaattagctcaattttatttggtgcttaccttggattgctagatttattatttagctacttaacgcaattgttcttatagagacagtatatgtgttataattgaactagctaaaaagcctccctgggaggtttttttatttgcataaggtattattttaaggagtttaaagacaatggttgaaaccagcgaaaagaaatggtacgttttacacacttattctggctacgaagaaaaggttaagaaagatttactttctagagcccaatcaatgggaatgcaaaactatatctttcgtgtaattgttcctgaagagcaaaagactgaaactgttcgtggtaagaaacaagaagttgatgaaaaggtatttccaggatatgttttagtagaaatggtaatgactgacaaaagttggtacgttgttagaaatacgccaaacgttactggatttgttggcagtcacggtggtggatcaaagccatctcctttatatgatgaagaaatcgaaagaattcttaagtctcaaggacaaccagctaaagagccaaaagctgactatgaagttggtgaaacagtaactattatcgatggtgcatttagcggcatgagcggtaaaattacagaaattaacccagaaaaagataaactttatgtttcaattgatatgttcggcagagaaacaaacgctgaacttgactataaccaagtaaaagaatttgatgaataataaagtctaattaactattgtcaatttgagtaattgctggtagtatattagagtatctttattattgtgggaggagaagaaggaaaattctccattataaccgcatcacggaatcaaggaggtattgaccgtggcaaagaaagttattaacgtagttaaactgcaaattcctgctggtgcagcaactcctgcacctccagttggtcctgcattgggtcaagctggaatcaacatcgttggtttcactaaggacttcaacgcacgtactgctgatcaaaagggtatgattatccctgtagttattacagtatatgaagatcgttcattcgaattcattactaagactccaccagcagctgttcttttgaagaaggctgccaaggttgacaagggttctggtgaacctaacactaagaaggttgctaaggtaactaaggaccaagttaaggaaattgccgaaaccaagatgaaagatctaaacgctgcagatgttgaagctgctatgcgcatgattgaaggtactgctagaagcatgggcttcactgtagaagactagtgtttttaggaacgtcggatcgttaatcaaaattaacgaatcaaggtgggagagtttgagaagactcgtttgaccacattttcaggaggatttttacatggcaaagcatggaaagagatatttagaagcagctaaaaaagttgattcaactaaattttattcagtagatgaagctatgaagttagcaaaagaaacttcatacgcaaactttgacgcaactatcgaagttgcatataacttaagcgttgacccaaagcaagcagatcaacaaattagaggtgcattggtacttccaaacggtactggtaaatctaagaaggttgttgtttttgctgaaggtccacaagctgaccaagctaaagaagcaggtgctgacgaagttggttctgacgatttagtagaaaaagttcaaaacggttacttagactttgacgtagttattgctactccaatgatgatggctaaagttggtcgtttaggtcgtatcttaggacctaagggcttaatgccaaaccctaagactggtactgttactatggacgttgctaaagctgttgaaaaccaaaaagcaggtcaagttgaataccgtgttgataagcaaggtttaattcacgcaccaatcggtaaggcttcatttgacgctgataagttagcacaaaactttgatgcattacgtgatgttattcttcgtgcacgtcctgcatcagctaagggtcaatatattaagagtgttgccgtttctgcaacctttggccctggtatccacttggatccattgaacttagactaattaatagttatttaattaagcaaaaagacttcacattggtgaagtctttttttgtactaaggttgaaagtacaattagattttagttagaattaaacaatacgctatttttagaacaggaggtgaaggaagtgctaaattatatttttagtattttaccttcattgttttccggtgcttggttaactatcgaaatctttttttggacaactgtagtctctatcccattaggcttattagtcgcttttggcttacattcaaatttaaagctggttaaggctattttgaaattttatgtatggatcattcgtggtacgccacttttgctgcaattgatttttattttttatggcttgccaactgtcggaatagtctttccgagatatgaagctgctttggttgcatttattattaactatgcagcttactttgcagaaatttttcggggaggtttacaagctgttccagttggacaatttgaagctgcacaggtgctggggttaagtcgcttgcaaactattaatcgaattgttcgaccgcaagttgttaaaattgttctcccttcaattggaaatgaattaattaatttggtcaaggattccagtttagtttatgtaattggcttgggcgatttacttcgtgctggaaatgtggcaacggctcgtgatgtatctttagttccacttgtcttagtaggatgtgtatatttggcaatgactgctgttttaacagctttattacgagtagtggagaagaagagcaatgtctggaaataaagtcttagaactcaaaaatatcagtaaaagttttggtacaagaaagatcattgataagttgaacttgtcacttgatcaaggtgatatcctaagtattattggaccatcaggttcaggtaagacaacattattacgtttaattgccggtcttgaaagtgcagatagtggaaaatttatccacaatggaaaagaatttgatccaactgatcgtaataatcatttggtagggatggtttttcaagattataatttattccctaatctttcagtgatggataatattactttagctccaattatggtgaataagatgagtaaggcagatgcggaaaaggtggcagaacctgttttaaagcagttagatttggaaaagtttaagaatttgtatccttaccagttatcaggtggtcaaaagcaacgtgtggcaattgctagagcactgcaaatgaaaccagaaattttgtgttatgatgaaccgacttcagctttagatcccgaattggtaggaaaggtaaaagaaattttcttaaagcttaaacaaactggaatgacgcaagttgttattacgcatgaccatcaatttggaaaagccgttgctgataaaatattaaaagttgagccaatagaaaaatgatgaaaaaaataataaaacttcttggcctactgattattgtaattacttctgttggattggcaggctgccaaagacaagcaagctcttggcagaaaattaaagagcgtggaactctagtaattggtgtggatgatagttttgtgccaatggattttcgtcaaaaaaatggtaagctagtgggctttgatgttgacttagcaacagccgtctgcaaggaaattggtttaaaacctgattttcaaactatcgactggtcgatgaaagaaaccgaattacgtaatggaacaattgatgtcatttggaatgggtatactaaaactaaagctcgagcaaaaaaagtagctttttcacgaccttaccttgaaaacgatcaaattttagtaacgcgtaaaaaagaacagataaatagttatcgtcaaatgaaaggtaggattctcggagtacaaacaggatcgtctggtgccgatgacttggataattatcctaatgttctaaaaaagcgggttaaaagcgcggttttatatgatacttataacaatgccttcatcgatttaaaagctggcagaatcgacggtttattgatcgatggggtatatgcaaactattacttagctcatagtaagtatcaaaaagaatttaaaaaagaaaaactaccatatccaagcgaaaaattctcagtaggaattaataaaaaagatcaaattttgaaagataagattaatcaagcgcttgatcatttagaaaagactggcgagttagaaaagataaaacaaaaatggtttaattaaaaaaagctattgacgactaatctaatttaaggtaatatattgtacagtaaattctacctaagactcgggtggctaacgtgccttaatatcccgccgaggccagaaaaactaagagttttacaactccatgtctttttggcatggagtttttatttcggctgatagaatttatcttaaagtaaatttggaggtgaattcgttgagtaaagcaatcattgctaaaaaagaaaagcttgttgatgactttgcagcagaacttaaggaagctaaagctatcttagtaattgactacttaggtttaactgttgaagaagtaactaacttacgtaaggatttacgtgattctaacgttaagatgaaagttatcaagaatacttacttaaagcgtgctgctgaaaaggctggtatcgaaggtttagacgatacttttgttggtcctactgctgttgtttacactgctgatgcagatgacattactgaaccagctcgtattgtttctaaatacgaagatgatatcgacgcattatcaattaaaggtggtatgctcgaaggtaaggttgccagccaagaagaaatcaagaaacttgcagctattccaggtcgcgaaggtttactttcaatgcttgtatctgtattacaagctccagttcgcaactttgcatatgctgttaaggctgtcgctgattcaaaagacgaataattatagtaaatttacacatatctaatttcggaggaaacttataatggctttagatactgaaaagattattgaagatttaaaaggtgcttcaatccttgaattaaacgacttagtaaaggctattgaagacgaatttggtgtttcagctgctgctccagttgctgctgcaggtgctgcaggcgcaggtgcagaaaagactgaatttgacgttgaattgactgatgttggtcaagaaaaagttaaggttatcaaggttgttcgtgacatcactggtcttggccttaaggattctaaggaccttgttgatggtgctcctaagaacgttaaggaaggcgtttctgaagacgaagctaacgacatcaaagctaagcttgaagaagttggcgcaactgttactgttaagtaataaggtcttaactgaacacactattaaaaatgaggactctattttacggagtcctcatttttgtttacaataaaattatgcttaagaaaaatttttataaatggtttaaggctactttagctatcgtttcaattgtactaatcgttttagactttgcagccataattgatattaatggcaccaatagcaagtggttttggcttaacaatattattttaattattttagcaattgattatttttataggctatatcttgctaaagataagcgggatttttttagaaataatatttttgaattagtggcaattattccagtgggaattgcttttaactggatgaaatttgcacaattgggagatatagggctatattttaggcttttgcgcttaattcgtttagctggattagtggggatgctgaaagatattctgcacactcatggcattttatacgtaatatattttagtattgcatttttaatgttgggatcagttgcaatttcaattactgaacatgtttcacttgatcaagcattttggtgggcgattactactgcaagtacggttggttatggtgatatttcacgacatacaatttctccgcaatctttactgggaaaattagtgattttggcaatgatcttgattggagtaggagtgatggggatcgttactagttctcttactgcctatttgatgaggagaaatgaaggaaaagtcagcattaaagataaagatgcagaattaaccttaattttagataaattagaccggttagagcagcaaaataagctgctagctgaacaaaatcaaaatttacaaaaacaaatccaagaattaaaggatactcatacgcctagtgaatggaacaagtttaaagattggatcgaaaaaaagaaaagataaaaattaaagcgtaaattcaaaagatgaatttacgcttttttatatagttaactgaaacttgaaagcataaaaactaaccgaagtctttatgaattctagttttttgatgcctaaattagatcttaggccgcttcttttagctcgctttgaatgcaataaggcaactttgtcatgaaatcattaattaattcattgattttttctgaagcgtcaaaagcaatctttttgagggctgaaatcaggtagaccaatgtatcgacaaacttgatatccggcagggattcgttcattaaataaaacaaatcacccatggttttgtcatctgtgctctgtctctcttgccaagctagcaggtcataggttattgctgttacggcaagatagccacactgcccgtcgtaactttgaatccgggacttgtttaaagccagatattgtttagtagtcttgaaataggtttcaatctgccatctacggccatacagctgaataatttcttctggtctaagcttgatctgggtggtagctagaactaaatagctactcttattgccacgtttggaaacaaagaccacttttaaaggaaattcatgaccatgatattgtgcaataacaatactggcataaaggtaacggtctttcttagtcatcttggaagcagccaagcgattatacaatccttttatatcatagtggcgttgacgataaacatagtaaattttggagctctttttgatcatgcccaagcagtttagcctaatttttttaaaatccagaacattttgggcgaggcaaaccaagagtcaaacaaaacatatttagcttcaactcccagctttactgcctggctaatcagctcaatggttacatcattcatctttcgctgggtctgcattcttcttttgcaagcaataaaacgctcgtcttgagtaacaagagctgaaccaatcatatttttcttgttattagtcgacatcaaggcaaagttgaccggtaagaacgtattgccatcgctccagcctagggtcaagccacggtagccagttagatattcatgcttatcatgatcatagactttagccagcagctcagtctttttggaacaagcatgagctatcaaagtgtcatcaacaataaaagccaatctgtgtcgcttgtcgatcactggtttcaaacaagaaacaaggcgagcacaaatcaaacacagcagcttctgccagttgatccggcggtcgttcagtatattgcgcacggttcgtacagaaaaatgcttgccgtcttttgcccgaaacaaagaaagccgagcaaagtgaaccgaaaccagccaagaaacaatcatagtcagcgagatgacagatctgcgtttgaaatttactttcttagatagtttagttcaggtagaccaattaaatttacaaatgaagaaattaatgatttagtatcgttttcagtgtcgatttgttctatacttttcatgaatgcagggtctcctttgctttgatttcgacacttaaagtataacgcggagaaatcctgcgtttttatttttgatcagaaaaagccaagagtcacgctgaaataacgtgaatcttagctttcaagtttcagttaaactatcaataaaatagcctaatgcctaattttaatttatatatcaacaaacttttcgtagattaaaggaatcacagcattattaagcgatgatattaacctcttaaaaaaaggaaaaacagaaatacttattatacttttgtaattctttctataaaatcattatagcttctactattaataagttttactaccttttcatcatcaatgactatggtcgataattcatcaaaaacttttctaaattcatcatcatttctagaattatacgctaaaacaaacaccaggtagattctttgattcagccagtcaacacctttaggattaatataaatgaaccatttactagatttagcatcatagtcaatagcatgaggaattgcaactagtccaaatgctgtactggagatattttctctttctaacagtttacattcaaattctggtcccactattccctcacgcaccattttatttgataattcagagattacctgtttataatttttctttttattatcgatataaaaagtgtccggtgtagtaaatactttcagccctattttaagccttttagctcttatttctaattttatttctctaattgccctttggagtttagttacatcattagaaaggaaaaaactagaaatatatgttgtattaaagttaacaaattgttgttcagagtctacgacaattactaattgtgtctgactcataatatcatttacatcagaaacagcatccaataaaatcagatcattactaaatctagcattaatttggtttagtagtctttgtacattatcatgataattactcatgtacatttgacatattattttgttttcattttgaatctgctcagctacggaattacctacatgtaatgcaataaatgctatttcttcttcactaatttctattccatatgacttatgaattgcatatgcaattaagcaggcacattcataaattgtaggagaagactgttttatattattcattaatggattatggattgtagcattatttttacatctttcaattaaacgaatcaaatgaggcaaaaatctttttttgaataatctttcattcaaattcaaattataagtacgacgtacaaatccaactatttcttgaaataattcttgtattttgtcatcatctttttttaactcgactcctttatctgacagcaacaaaaacatctcttctagttgatgaacatcatttgaagaaagatcgatattttcattactttttatccatttcacgatctgattcacaatctttagattactataaactgattttaaattattactgcctcgatcaatcataatcacaatatgaagcagtaaattattaaagtcaaaatcatctattttaagctcatatttttccaacaacagtactagcatttgatttaccgcgtctactttaattaatttaaaattatcttgaataacttttttagtcaatagagttcctttcaattcttgataaatcaaagcagataaaagcttgcgtttattttgctcagaacctagtactttgtaattatcacccattttacttaaagttagatcaaaatcgcttaattctgtttctagattttgaatttctttgcgtagttctacttcattaatatacaatttctgtgacaaatcataaatatttacgtcatctttagtttgaagcaaatatcgaagtaaccaactctttctttgagagtaggtctgaggtaaaagcaacttcttctggttcgtgttttctcctctatactgatatccattaacagaacttttaatactaactccttgcgcacgtagcttttttatcttattttttaccgttcgctctgttattcctaactgaactgacaacattttagctgttatccaggaagaactattcttctgtagtataagcaatatatcttcattgttctgcatcgattagtcctcctttaatagctcttattcaagatttgaatgcatttgtctcatttttttagaactcaagtgattttgattcagtatatgtaaaataattgaatcaaaaatcaaaaatgaacattgttcaaataatgaacccatcggctgaatagaaccattataatcatctttagattgtgcattaattgtaactaccacatcacttttttgggctaggggtgagttattgttgacagtaaaagtaagtatctcaacacctaattgctgagatactttagcctgagaattaagtaatgccgaagtgccactcgcagagttgaaaatcaatatgtccccattagataatgctggtgcagtaatttcagaactaacatgagagtttagacctaattgagtcaatctatttgcaaaagcggctatcattagaccacttctaccttctccagacagaaatatttgtttagcactaaaaagcatattaatgatctggttcatgtctgcttttgataacgaagtagtagtcgcaactatttcatttgttatatccttaaactcttttatcattaactaacctccttacgtaacctatttcctacattcccagacgggtgatttagcaaaaatgttttcttggtaaaattttcttttttcatcaaaatacatgcaacaacatcgaaaagagaaattactgctaatgagctagttgtagcaagcatattaaattcatcaatttcatgatctactttaacttttacaactaaatcagcacttctacccaaaacagattttggattctcggttattaagataatatatgcttttttcttttggatattgcttacaaaatctgttaattctttagttgatccacctttggagatgaagataacaatatctttataactaataacacctaaactaccatgaacggcatcagagggatttaagtaaaatcctctaattcctactacattcaaagtgtgtgtagccttcttggcatccattgcagaagttccacagcctgtcagcaggatattgcccttgcatgatgcaatcttatccactaatgtttcaatttcttttgttgccagactattagctagttttgagatttcttgaccttcttcatcaaacaaagtcataaaatcactttttgtcattattaatcacctaaaatcatgataaaaacatgtctttgacgttttctagtttgatcaaaatcaacaaagaatacttgtccgacagatcctaataatggcaagccttcctttataacaagagatacactagatcctaacaagtcggctctcaaatgaccatctgtgttaagcatcgtccatttaattgcaggatagtttggatcggttttcttcattccatatgctatatgtttaggcccagggctcaaatagggatgattctctgtagtttgtcgaggaatgatcttttgcagtacattgtttaggtccacttgtagataatcatcaccatagtaatttttatcatgcatatactcatcaaagtatacagaacaagtggtgtgggtagtctgtaccacacacattccattttgaataccactttccttaactgcaccttttacttgatctgtaatcatatgataagaaggacgtccatctactgtattaatagtaagttctttaaaaaaagtactcattgctcaatttccttcttaacttggtcccagactttatcagctcctaccccagttagtaaagccacaccattaattaccttatcttttattacatcaggaacaatggtagtactgattacgatatcataatcaccattattgatgttgtcaatctcttctgtaactgcagattgtttaatttcaacttgatcttgtaaattattctcttcaagccaattattaactttagcatgtacaacagttgatgtagcatgaccagcaccacacataattaacatctttttcatgattacttaccttcttcattcagattgtattttttaacaacattgagatagaataataaacctaacaagataacaattagaataattattcctacaattcctaagctttgagacatccaaacccaaattgcgtttgtccataagccggctaattcaaatgaaaaggcacctttagtagcaatactataattagctaatttgaacgacttcataactaatggacttagccaagtagccaaatacaacatagggattgagtaaatagtagccccaattaaacttctaataatatttcctttaaatgcaccaacaagcaaggtaaagacatagacatacaaagttaaatcacccaaaggcaataccttatttcccggaagaataactgccaagaataatgaaataggaatcattaaaacactagtagcaattacggctggatgtcctacggttaatgcagcgtccatacctacattaactttcttaccatgtaaatgcttctcagtaaacttttgtgttgccgaagaaattggagtcaaactttccataaacatggaaatcatcttgggcataatctttaaaactgcggccatttcagcaccaagttgcaatgtcttagagacatcgaaaccggctaacaaaccaatgcctacacctacaattaaaccaattactaggggatcaccaaaaataccaaaacgcttttggatcttttgtgggctggcatctaatttgttgaacccagggattctatcaaaaagccaatttaatggtacagccaaaaatgtagcagacaaagccatcatatgagtaactgcaatacctggaagtttaaagaattttccagtaatcggttgcattaaatctgccataaataattcgagtagaaaaccaccagcaatagcaatgattgcataaacataatttttagttacagcccaaactaaaaggccaataaaagttggttgccataggttccaaatatcaacattaagcgttctagtcatacctaaccaaatcaaacccaaatttattgcaatagttaatggaatggcaatagcacctaatgatgaagaaaatgctaaaggtcctccaacaccacaaccaacatccataatacttaaagacatatgatatctagaaaccatcaatttaattgctggttgcaaatctgcggccatcatatttactaccatatttaggccaataaaccctgcactaagagttaaaccagagataaacgccttggcaggttttaagccaacaattagtcctagacttatgatgataattgggataccaacggtagaacctaatcccaaaaaccaatgtaaagcttgtacaaacatttttcctcctaatctaggtgatactcccttaaagttttctcaacagcctttttattattcgcattgattaatttttctactgctttaggctgttgacacatgttaattaaattgcttaaaagatcagcttgttcatgtggctgactcattgctatcataaacaccacatttactttgacctttttattagaatcaaccatatcgttaaacattataggcttttctaatgtagcgacagcaatttgtgatttattaacatatgctgaatctgtgtgcggaattgcaattcctagtccatctttaatagccaaaccggtaggaaattgcttttctcgatttaatacatgatctaagaaattacttttaacgattttcttctgagttaaaatcttagctaacttggtaataatatctttattgttttcagcctttacttttaactcaataacattttcatcgaagaacactgccatccctcctttctcatttcacttttatggtacgcactaacaggtcaaaataaaaaacaactttttcaccatgggtgtgaaaaagttgtctcgaataaattattaagatttaatagattagttatatagaatagaaagaggttttttaaatggttaaaattgcagtgtctctacatagtggtcctaaattacatctaagcaaaacattggatttacttaaatctgctaaagcagattacttacacattgacgtaatggatggcagctttgttccagaaatcgattttggtgctagtcttacacacgaaattgctcagtatagcaatattccattggatattcatatgatggttaataatcctattaggttaatcaagcattatgatttcccaactacgaatagtatcggaatccatgttgaagcaacccagcaaattcaccgagatttatatttcatcaaacaattaaacaagaaggcagaagtaagcattaatcctggtacaccaattactgcgttatatcctatcttagatttggttgaccaaattatggttatgtccgttgacccgggatgcagtggaaaatcgccttttatttctgaagtttctactcgcattaaagaattaaatcagttaagaatagataatgactataattatcaaatagaagttgatggtggcattacagaacaaaatctaagtccattaattgatgatggtttagatactgcagtttctggatcttttgttttccaggggaataatattaaggggcaaattcaaaaactaaagaattgtgatcatatttaaaagctaagaacaatattcaaaaagctaaaaatcatacaacttgatccgtaccgtgtcaagtagacagttaaaatatataaattattaaattaatcagttcgtaattatgcggactgatttttctttgtctcaacttttctccagaaatctatgtagcgtttatcctgcttaattggataagctgctactttatctggattattcttggcctcttctctaacttgtgctgaggttttaccattgaaccgttcctgcggatcatgatatatgtaatagtcaatacttgccttaaaggcttcctccatactttcataactattcgcatttggataaagtactgctctcatttctttgattaggccttgccagccctccattggtccattatcaatacaacggccagctcttgacattgattgtgacatgccatgttcttctaattcatgcttaaatggggctctggtaaattgaaatcctcgatcactatgaagcattgcatgactatctggttctttatcccaggcagctgatagagcagctttgactaaggcagtatcattacgcttgcttaaagcataaccaaccggaaatctatcatagagatcaaaaatggtgcaaatgaagatcttttgtgaagttcctggaattttttcttcagtaatgtcagtacaccatttttcattaggtctgcctgcattaaaatcgcgatgcaaagtattttcggctgtttcttccggtctagaagctttgtaccgataggctttattgaatctggccttactagtataaataccattaacacacataagacgagcaaagtgtactgacatcaaccaagagatgatcatggttaatgaaacggtagatttacgcttaaagttgacttgtttagttaacttagctagaccgattagtttgataaatgaagaaattaaggatttagtatcgttttctgtgtcgatttgttctatactgttcattgcgtaggatctcctttacttttcaggttgacacttaaagtataacgcagagagatcctgcgtttttatttttgataagaaaaagccaagaggcgcggggaaggagcgttaatcttagctttcaagtttcagtagttaaataaaaatgtaagatgatcatgaataaaatatagcaactggcaatgataatgattacccagccagctgttaaccagaatcttgcccaagtttgactgttagttgaaagaacacggccaaagacagcttggttgccctttattctgaatcccatccatagacagaaaattccgacaataattgctaaaataaatataggaatagaaactagcattctatctctccctttctgtaatcattctaattataaagctttgtagaaaaaagcaaagtagaattgataaactataagatagaaattaaagaagcgagaataattatgacaaaaaagaatcaaatgtattttgcggctaatccagatgctaagcatgatgaacatttagttgattatcatattgatgatattgatttgaaatttacaactgatgcaggcgtattttcaaaattaagaattgactatggttctggtgtgttaattaaaaccatgaaagaactaacttttccagaagctggaattttagacgttggaacaggttatggtccaatggggctatttgcagctaaattttggccagatcaagaagttgatatggtagatgtaaatgagcgtgcgatagatttagccaaaagaaatgcacaatttaatcacattgataatgtaaatatttatgaatcaaatatttatgaacaggtggataacaagtatggactcataattactaatccaccaattcgggctggaaagaaagtagtcgaccaaattttatctgaagctaaagagcacttagtggaaaatggaattttgctagtcgtcattcagaaaaaacaaggggccccaagtgcaaagaagttaatgacaaaagtatacggaaactgtgaaattctagctcgggataagggatattacattttaatgagcaaaaataattaaaaagataacgataatggtttataatgaaagcgaatacaaagtgataaagataatgctttgaaagaagtgaatcattatgaaactattgattaatattattttagtcttaattgttttggctgggtttggtggaatgatttatttatcagttaatggtaataggttccttggagcagctggtttagcaatgctttattttgtcggatcaattggctatttcgttaactgctatacgattaaaaaacgtggccggatttaatagaagaggtctaaaagatcttttttatttttactttttatactatacatgaatatgtttaatgatgaacttctttaagtcagccagttaatttaactggctttttcgattacaataataacgagcaataaagaattataggaaagatattgaataaagggtatgtttgaaaaaaaagataaggaaaaatacatgcagctagcttttgcacaggccaaaaaagctgaagatcaaggagaagtgccgattggtgcaattgttgtggataaagatggaaatgtaattggggaaggctacaacagacgtgagcttgatgaggatgcaacgcagcatgctgaaatgattgcaattagacaagcttgtcaaaatctaggttcttggcgcttggtagattgcagtttgttcattacgcttgagccatgtccgatgtgcagcggtgcaattattaactcacggctagctgaagtgtattatggcgcttttgaccccaaggctggagcagctggaagtgtaattgatctattcaaggtggaaaaatttaatcatcatcctaaagtttttggtggcttatttaaagatcaagcggcacagatgctaaaagactttttccgcgaaattaggcgtaaacaaaagcaagataaatagtggaaaaaataattaaaatactgtattatagtttgtgggcaatgtccgacctccaaattgtgtcaggaccggaaggtagcagcactaaggttgcttgggcatgtgcctttttttgagaaattaaacagctcttagctcgtttgagctaggagtttttttgataaaggaagtgcaaaatggcttatcaagcgctatatcgtaaatggcgtcctagaactttcgatggggttgtaggtcaaacagcgattactgatacattaaaaaatgcaatcaagcgtggcaagatatcacatgcttttttgtttgcgggaccacgtggtactggtaaaacatcatgtgcgaaaatttttgccaaggccttaaattgtactaatttgcaagatggtgagccatgtaacgagtgtgaaaactgtcttgcggcagataaagggacgatgaatgatattatcgaaatcgatgcagcatcaaacaacggtgttgatgagattcgtgatatccgcgataaggtaaaatatgcccccacccagggaaaatataaagtttatattatcgacgaggttcatatgctttcaatgggtgcctttaatgccttgcttaagacactagaggagccacctgagcatgtggtatttattttagctacaactgaattacaaaaagtcccagcaactattatttcaagaacgcaacgctataattttaagcggattgatcagcatgatttgattgctcgcatgacttacattcttggtcaagaaaagatcgactttgaagaaaaggcacttgaagtaattgctcaagtagctgatggtggaatgcgggacagcttaagtatcttggaccaaattttatcttatgatcaggataaggttaagtatgaagatgctctgaaaattactggttatgctgctcaagaaaagattgagcaagtcttactagacttacttaagggccaaacgtcagaagcattcgagatagttcataatttacttcaagacggtgcatcaactaagaatattttagatgaactaattagcttgactgtaaaagggatgctggttgttaagagcaataaagaagcaacttttttaactaaagattatgcaactgaattagctaaaattccagaagaaaagttttataatttagttcaagcagccaatactgctttaaatgatttacgctacactaatcagcaacaaattccacttgatgtgtttgtggttcaagtcacacaaggggtaggcggaaatgcaccagtagaacaaggtgattcagtttcttcaattgtcgttcaaaagttaaaaaatgaaattgataatttaagtaaacaagttgctgaactaaaaaatagaccagttcaagtaactaatagaagtagctctgacttttctgggactattaagacagaaactaattctcgtcctaaacaaattgctgctcaaacagctaatactgatcaaaaacctaagagaagaaaagctagtgcaaataaccaagcagcacaggaaaataatcgccgtcaagtctaccatgtacttgaaaatgcgacgaaagaggacttaaatacaatcaaagatatttggccagatttattgtctactttgaaggtatctcaaagagccgtcgtggaagttttgaatcctgtagctgcaagtcatgagcaaattgttttaaaatgtaaatatgaattatggtttgaacgggcaaatcaagatggggatttaatttctcagcttgaagctgaaattgccaagttaacgaagcataattatagtattgttttagttgcagattcttcatggctaaaagtacggcatgattttgtagcaagtcataaggaagaattacttgctaaaaaatttcaaaaaatagaaaaatctgaacaagaaacaaatgaaaatcaggtagatcctcaagctaaaaaggaagttatcgataaagcaaaagaactttttggagatctagcgcagattaaagattaaggagagaaaaaatgagtagaagacctaattttggtggtatgggcatgggcaacatgcaaggcttaattaagcaagctaaaaagatgcaacaacaaatggaagctgaacaagcaaatttagctactcaagaatttgttggcaagtctgctgatgatgtggtagtagcaacttttagtggcgaccgtcaattaaaagatttaaagattgataaggaagcaattgatccagatgatccagatatgcttcaagatttagttattgatgctgttaataaaggaattaaggcagtcgatgatgctactcaagcatcaatgggaaaatacactaaaggtttgatgtaattatgcaatatccattaccaattgcacgtttaattgataattatatgaagttgcctggtattggtgaaaaaacagcaacgcggttagctttttacacaatggacatgcctgaagatgatgtggaagacttttccaagtcattaatgcaggtaaaagaaaatcttcactcttgttctatttgtggaaatattaccgagagcgatccatgtgaaatttgccgagatgcaaatcgtgatcgttcaacaattatggtggtagagcagccaaaagatgtaatggcttttgaagaaatgggtgaatataacggtttataccatgttttacatggtgttctgtccccaatggatggtgttggcccagaagaaattaatattaagagcctgattactagactgcaaaagcaagatgaagttaaagaagttattttggctttaaattctagtccagaaggtgaagcaactgcaatgtacttagctaagctaatcaaaccagccggcttgaaagtgacgcgcctagctgcagggttagctgtaggtagcgatattgaatatgcaaactcaattactttgaagcgcgctgttcaagggagaacagatctatgattggaaaaaggcataaagttaaaaacgcaggcgatgagcgactattaaaagtagttgctcaattacaaagacaacttgcagaacaaaaagtttttgatcagacaacaattgattattcatttgataatcgcgttttaaataaaattctacatgcaaaatttatttttttgtatgaagaagcaagaagaagaaacactaaatctagtagctcatcaagcgtgattactagataatgtagtccaccactggtgggctttttttgtggaaaaataaataatctgaaaaaaacaagtctgtctttcttttttcttttacagtacaatgccaattgggggtagacatgaaaggatatttaattacatttgaaggcccagatggggcaggaaaaaccacagttatcaacgagcttatcaagcagttgccaaaagaaatacagaaaaagacgattattacacgtgaacctggtggatcaaagatttctgaaaatattagaacaattattttagatccagcaaataaggaaatggatgatcgaactgaagctcttctttatgcagctcaaagaagtcagcatgttagtgaagttattcgcccagctttggcagctggaaaaattgttttatctgatagatttatcgatagttctttagcataccaaggtgttggcagagatttaggcgttgaagaagtaaagcaaattaatgattttggaactggcggtcttgagcctgatttgacgatctttttagacttagatcctgcaactggcttggctagaattgaaaaggaacgagcagggcaagaagatcgacttgaacaagaaaaattagctttccacaaaaaagtttatgctggatatatagacttgttaaaacgatatcctgatagaattaaaaaggtggatgctaatttgccaatcgaggaagttgcggctaatagtgttaaaataataagaaagcaattacctgatatttttatgtaaggatttggtaagaatgaaactcgttttagcaattgtacaagataaagacgcggatgcattggcaagagaatttattcaaaataatgtgcgtgcaacaaaattagctacaagcggcggctttttaaaggcaggaaatacaacttttattgttgggattgaagatgaccgagtaaatgaagtattagaaattatcaaaaagagttcccacactagggaacagtatgtttctaatatgaatatggatgcagcgggaacttcaatgctaggtaagcctgtccaagttactgtaggtggagcaacggtctttgtattaccagttgaggaatttaagcacttttaatgattgatttaaaaaatataggtcaaaagcagactgatcttttaagggatgcatatttaaataaaaaagttgcccacagttatttgtttgtcgatccaatgcaaaaaaaaggacttaatacagcttattggctggcctgtctttttaattgtacaggagaaaataagcctgatgggacgtgcaataattgccaaagaattttagatggcaatcatcctgatgtctttttagtaaaactagaaggaaaacagacgctttcaattgatcaaattcgtcctttgaaagaagaattggcaaaaagtcctgttgaaggcaagcgacgtttttttatcattgaaaatgctgaaaagctaactttagctgcaagtaatgctttgcttaacttattagaagagccggtagcacctgtagttacgattttgataaccaataatgaaaatcaaatcttgccaacagttaagtctagaacgcagattcttaatttctctgatgaaaaaattgatagtaagagagcgcagttgcttgaatatggcttaactgatgaagaaattgatgatctaggcgatacggctaagcttgaagaagaaagtaaatatttgttccaagagttattagagcagaatgatttagcactggtacgcgtgagccagattagcggtcttgctacaaagccagcaagccaaaaatttattttttatcaacttaagactttagccatgaagagtctaactagtggtgaaaagttaaggaaaagtgcatttttattggagttattgatgactgctgataagatgcgagctagtaatgttagtttccacaatacgttagattatttagtattgagttttgaacggtaggtgtttttgagtggatccattttcacaattgtcacaattacagcaaaatcttcaggcaatgacaaaaactgttgccggtctggaaaatgacatgcttgaagtattgaaagaaaatacagaattaaaggttgaaaatcaactattaagagaaaaaattagtaaattagacgctaacaaagaaccagcagaaagtaagtcccaagctggtctaaaatcactacgtaatatttacgattctggctatcatatttgcaacatgtattatggctctcaccgtgaatctggtgaagattgcatgttttgcttagatattttagataatttcgtaaatcacggacaaaaaaataggggataaaagatgcaagcgcaaagtagttttaatgaaaaagataaggggcgtctttaccttgtccctacaccaattggcaatttagaagatattactttaagggcgaagaggattctaactgaagctgattatattgctgctgaagatactagaaccagcggaatcttacttgaaaaaattggcgttcataataggatgatttcttttcataagtataattctaaagaacgtgcgccagaattaattaaattgcttaaagaaggaaatacgattgccgaaatttctgatgctgggatgccggttatttccgatcctggttatattttggtccaagaatgtatcaaaaatgatatcccggttgtttcgcttccaggaccttcagcttttgcgacagctttaattgcatctggctttgatgctcaaccatttacctattatggctttttaccgcgtaagagtagtgagcaaaaagtatattttgagatgatgaatcaggcacgtgcaacttcaattttctatgaagcacctcatcgtttaaagaagactttaaaaactttggctgaagtaattaaaccagatagaaaaattgtgttagctcgtgaactaacgaagattcatgaggaatatttaagaggtacaattagtgaaattaatgaatacttcactaagaatgatcctcgaggcgagttcgtagttttggtttcaccaaatgatgagaaagaaaagcaactttcttgggatgagctaatcaagcaagtggctgatcgagttgaagctggcgaaagtaaaaaggatgctattaagttagtcgctaaggctaataaagtatcaaagaatgagctctatgataaatatcatcaaaattaattgcgtggtgatcgctaatggaaaagatttttaaagaagaacatcaggttacttatggcgactgtgatgaaacggggaaaattcagcttcctaaattaattgaacattttatgaaagtttcaaatgatcaattaactcaaggcaatgctgggattcatgatttattaaaacaaaacttaggctgggtggtagttgaatatcatcttgatcttgagcgtcttcctgaagctggtgaaaaaattaccgttacaacaaacggtagcggttataatcgcttttttgaatatagagattgtggtataatagactctgctaacaaaaagatggtagatgtcaaaagccaatgggtgattttagatctaaaaaatcgaaaaattactgaagcagatagtcaaatgatggaaaagtttggaaatccatacttgaaacatatgccacgttttaagagattacgtcctttgaaggattatgaatcgagtaagacatatgcggttcgttactatgatttagatacaaatcatcatttaactaatagtgtttattttgattggatgattgatactttaccaagagaatttttgaattctcatactgctaaaagtgtcgatatttcatttaaaaaagaagtacaatatggcgatcaggccgtgtctgagcttacgcttgatcaagatacgcttacgtcgtatcatttgatttctaatcaaggtgaaatttctgctttggctgaaattagttggagagaaaattgttagtacagtcgtgtttttttggaaggtagggataccaatgaagacgggaataaagaaaatagatttgcaaggtttagttactttggcactatttgtagcgatggatattgtattagaaaaaatttcttttggtccttcaactgtaaaagtaggattgggatttattggaagtgcgcttttaggatattatttcggcccactttggggtggaatcggcgcattaattagtgatttattgcggtcagctatttttggagttgagggaggtttcttccctggctttactctgtcagctattgttggcgtggtaatctatgccttctttttataccaaaaaccaattaaatggtggcgcgttattgcagcaactttattagtcactttagtagttaatgtattaatgaatacttattggattcacctactatatggcctagacttacgagcagccttcttacaaagaatcttgaaagagttaattacgccatggattcagattgttgtactttacgtgattttaaatgcttttcaacgtgttaaaataagaaggtaatttcgataaatatttaaggatagagtttaaatgaagatattaagtatcacgactgcaaccaatcatttgagtgtagctttgaatgatggggataaaattgttgaaaaaaatgaagaggatcatcgcaaccatagcgagcatttagatcctttgattactgaattactaaaagaaaataatcttaccttaaaagatattgatcgttttgcagtggcagaagggccaggttcttatacgggattgagaattggaattacaactgctaagatgtttgcttctattttaaataaagatttagtcggagtatcaactttggctgctttagctaatggagtaaatgacggagtgattgtaagtgagttagatgctcgtaacaagaatttctttgctggggtttatcgaaaagtaaatggtaagctagagaacttagttccagatggtcattatcatttagacgatttaattaataagattaaagaattgggtctgcctgaagaagttgtctttgtcggcagtccaattgataaatatcaagatgagattgtggaattattagggtcagacaactttaagcaagctgcaggtgataatcaaattcatgctggggaaattggtaagttagcacttaataaggaggcaattgatcctgataagatggtgccaaaatacttgagacgtacacaagctgaaattgattggcataataagactggaagggcatttggtccagatagcgactatgttgaagaagtttagtttattttttcatccagcagaaattgacttgagtttttcgccttttgctttgagacttgataatcaaacttatcaaattatgaaggcaagcgatgaaaatattgctgacttgttgggcttagagcaagaagtttattttggcagaaccccatggagtcgattttcttttaagagcgaattgaaaaagcatgccaattctttgtatcttgtggtttatcagggttcaaccttggtaggcttcgtcgggatgagaatgcaggcacaagaaggacatattactaatattgctgttaagcctgcttttcaaaaaagaggaattggtggatttttgctcaggacgatgattgaaattgctcaaagaaatcatgctgttcagatgaccttagaggttagaagcgataattacaatgcgcagagcttgtatcgtaagattggatttagggataattttattcggaaaaattattattcggctgaacatgcggacgccgtaagcatgattaaaaagatagcagatagagaacaggaagaagtaaattgacaaaaaaagatattcgaattttagcatttgaaagctcatgtgatgaaacttctaccgccgtaattaaaaatgggcgcgaaattgaaagcttaattgtagctactcaaataaaaagccaccaacgttttggcggggtagtgccagaagttgcaagtcgtcaccatattgaagtaattactcaaattactaaggaagctttagctgaagcaaacgctacttgggatgatattgatgcaattgccgttacctatggaccaggtctagttggagctttgttaattggggttagtgccgcaaaggcagcttcaatggcaactgggattccattgattggcgttgaccatatcatgggtcatattatggcagcgcaattaaaggatgaaattgaatatccagcacttgccttgcaagtttctggtggtcatactgaaatcgtcttgatgaaagatccaatccactttgagattgtgggtgatacaagagatgacgcagctggtgaagcctatgacaagattggtcgagttttgggagttaattatccagctggtaagacaattgatgagtgggcacataagggtaaggatactttccacttcccacgggcaatgatggaagatgatgactatgatttttcattctcaggcttaaagagtgcctttatcaacacttgccaccatgcagatcaaattcatgaaaaacttgataagtatgatttagctgcaagttttcaggcttcagttgttgatgtgttgagccacaagacaattagagcgatcaaagaatataagccgaagacatttatcttaggcggcggtgtcgccgcgaaccacggcttacgcgatagattagcagaagagattgaaaagttacctgctgatattaagccaaaagtgattttaccggacttgaaactttgcggagataatgcggcaatgattggagcagctgcatataacttgtataaggctggtaagtttagcgatgagaatttgaatgcagatccatcacttgagttgccatatgcagagagcatgttgaagtagaaaaatagttatgaaaagagtcgaacagggatgtttggctcttttttggtagaatgtttttattttctagttttaaataactgacacattaacatttcattaaaaacaagcaatttctccgttgcttgttttttcttatcactaacatgtttccgcaagtccttattctgccgttttataacaattgttgttataataaatacgaaagataaatagtcttgaggaggaattattatgaaagatgaagttcaatctccacaagaagaaactcctaacacttattggcgttggttagtagaatcatggcgctatcctttaggccacaatcctgcagagaagtggtatggagttgttaccttattaggtgaagatattgtattattcattggtttagctgttgcaggtaattacattgccaacctgtttgacatgccattagtacatcatggatctggtgcaactttctgggcaatagtaattttatttgttgttcagattattacaattctttgttcaatggttggacacttattcgtgtttggtaatacgggcggattttggcagtatgtcaacaaggttgctcaagtaactaactggaacttttggattgtaatttgtgcattcttcttcttaattctaagtttaagctcaggtttgcttggatttggagaagcattagtttggattttttatgcactgttttctttaggttcatttttgctagttgtttgtcctgatcccggaacagaagagatgatccacgacccattctggagagcagttatttacttagtaatggtagctgtagtttatgccattatttggggcatagcattaagtattttaattaacttgtagaaagttattatttctatataaaaaggtgttgatcatcttcgcttattgtgttgaatgatcgacaccttttgttttgaaaatacttatgaattattcttctgcatgtttaactttaggcaagttagatagcttgtgataattcatctgaattcttagagctgcgtaaattggttttccacctaagagatctaacacaaagtaagcgataaaagtggtgatcagcattggaaaaatctgttcaactgatccaactatttctgttaaaagtgttaaagctgtaaaaggagccttttcaatagcaccaaaataagcacacatagaagtaacgataataatcccgtaacaacgtttaggaacaatgttaaagtgaatcataattactgcaaatacaacgcctagaagtgctcctagaactaagattggcataaaaataccaccaggcacagaggcaccataagaaatcattgagaaaacaaaccgaacaacgaaccaaacaagcggtaatagtatcagacttaaagttccagtctgaatacttttcataaaaatcgggtcaaataaacttgaaataaaatcgtgtgagccgccaagtaggttagcattccataaaccaattggaattacgagcagaagcggaataacactatgataaattgctggaattttggtgatctttgcatagactggtttaaggcttaagaggcagtattgataaaggtatgcgagtaagcctaagactacaccaataattgctacaaaccaataagaagtaagtggcaatgacttgtctaaaggaagatataggcaaggctgcgtgccaaagaagcaaagcgtcattaagtcagatgacatggcagcagctaaggcagtcaggacttctttgggagtgaagttaaaggttatttcttctactaggaagaagacaccagctagcggtgcggaaaatgcggcgcttaatccagcagctattccgcatccctggagtcttttaaggtcatctggatcagcatggaagagattttcaccaaaggcctgaccaaccattgcgcccatttgaatacaaggaccttctcgtcctaagaatagaccgggacaaatagctagcaagctaccaacaaacttgcgccagagaatgctccaccagttcattttattttcgttaagcatcacagcttcaacttgcggcacaccggaaccagtaatattacttagaacgggtttaataatttttcctagaattagaacgattgacaaagttgcaatgatgtaaggaactaagtagatcggtttttgccgcattaggggatagataaagaataagaacttcattgtgtggtcgataatccacctaaaggtaccgacaattaatccagttatgatcccgatgataattccctgtaagaagataaagaagaagtttgatgtaaacggcttagctaagacttgcttggcagctttaatcaattttttcgccagctttctaaaaagtacttgcttaatttagtttacatcaattagaagttaaactaataaaaataacgatagctgtgcgctatcgttgtttttatcagtattaatctgttggtaacttatatagttgaggattttgcattaaataaagttgattgttgtcgaccattagtcctttatgctctaagttttcatacatttcatagaaatattgtggatcttcttcataaaaataatccggtggaaaacatagaaaattatagacttttgattctttaaataaattttcagctttttcgatcgacatatgatcatttgcagcaattaaaatactgacttccttagtaattgcattaataaatgattcggttacgtatttatttttcttcataaaagacacctccatattttaaacagttaattgaattttgagttttaaaggcccattggtcagttaaattttctggtttaagacgagatatagctttctcaaaagatattgtaccattagaatatagtgccaatgcttcccaggaatttgctccatcaactacaggacctataactagatcataatctgtatttaaagcaaaatcgatattctttctattttttatgatatagtttagccaatcttcgcttacatgatcaaatattttgactcttaatgaatagaattggtttgtatcaaatacatatttagaaattaaaatgttgtacggattttgttttaattttgaagaattaatttttattttatgtttgctccattttgctgcttgattaatatctgtagttaagtaaaagcctttaccgaagtcatgtcttggttttcccgcatgaatatctggtttttctacaataacgtcactgccatggtacaaaagatttggaatggaaattttcatactaaatcaactttctaaaaatatatagagaaaaagttagtctctatataaataagtacgcaaaaagaagataattttttgtatgaaaattgaatgaatataaaaaacgaagtatccacttaatatgaatacttcggttctctgatttaaattttatttatcgccatcaaaaatggaagattttacaataacataatctactactcgaattgcactcaagtctttaccgccagcgtatgaaatagaagactgtaaatcttcctgcatttcacgcaaggtatctttaatagagccacgataaggaactaacatttgctttccttcaacattgcggtaggctcctttttgaacttcagaagctgaaccccaatattgcttatatctcttgccatcaattgtaattaagttgccaggagattcctcgtgtcctgcaaatagagatccaatcatgaccattgaagcgccaaagcggacagacttggcaatatccccgttgacgaataccaccgtcagcaatcaatggctttctagctgcttttgaacacattctaagtgctgctaattgccagcctccggtaccaaaaccagtttttaacttagtgatgcaggcgcgtcccgggccaacaccgactttagttgcatcagctccggcattttctaattcacgaactgcttcaggagttgcaatattgccagctgttaggaaagtatctggcaacttatccttaatgtatttgatcattttaatgacgtagtcagaatgaccgtgagctacgtcgattgtaatatattcagggatgatcttttctttagccaaatagtcgataaaatcgtattcgctatctttaatcccaacagaaattgaagcaaataagcctttatcatgcatcattttaataaaatcagcgcgcttttctggataaaaacggtgcattacatagtagtagccgttttccgctaaccaaatagctaaattatcatcaattacgctctccatgtttgctggaacaaccgggattttaaatgttcggcttccaaattttacgcttgtatcggcctctttacggctcttgataatgcatttattaggtacaagttggatgtcatcataatcgaaggcttccatactaaagtaattgctcatctaatttacctcgtgctttttaaaaactacatgagttaatatacgggggttatgaggtaaagtcaagagcaaaaatgaatgtttattttattgattatcaaaaatgttcggaaattaattgactattaagttatagattgttaaactagtcttcggttttaagaaaatgatttttatgaggtgaaatcaaatgacagcaatagcagttgtaggtagtcaatggggcgacgaaggaaagggcaaaattaccgatttcttaagtaaagatgcagcaatggctgtacgttcaaatggtggtaacaatgcaggccacactattgaaattggtgacaagactttcaagatgcgcctaattccatctggaatttttgctgctaagaagggtgctgtaattggtaatggtgtcgttatcaatccagaagtaatgttcggagaattagacaaccttgaaaaagaaggtatcgatattagtggcttgaagatttctaatcgagcacacgtaattatgccttaccacattttgcaagatacttatcaagaagaagctaagggtgacaagaagatcggaactaccaagaatggtatcggcccttgttacatggataaggcttcaagaattggtattcgcgtttgcgatttacttgaaagagatacttttgaagaaaaactacgtactaatttagctgaaaagaatgctttatttactaaggtttataacaaacctgctcttaagtttgaagatatttttgaaaaataccttgaatacggtcaaaagatgaagaagtacgttactgatacttcagtagtagttaatgatgcgttagataagaatgaaaaagtcttattcgaaggtgcgcaaggtgtaatgcttgatattgatgaaggtacttacccatacgtaacttcatcaaacactatttctggcggaattgcttctggtatcggaatgggagctaaccgtttgaatactgtaattggtgtctgcaaggcttacactactcgtgttggtgagggtccattcccaactgaattattagatgaagttggtgatcgcattcgtgaaactgctcatgaatatggtactgttactggccgtccacgtcgtgttggttggtttgactcagtagctcttcgtcacgcaaagcgtgttgctggtatcaatgctttaagcttgaacttattagatgtattttctggctttgacaagattaagattgctactgcttatgaacttgatggtaagaagattgactactacccagcaagcttgaaagaattatacagatgtaagcctgtttacgaagaattaccagcttgggatgaagatattactaatgtaaaaacttgggaagacttaccagaaaacgctaagaaattcttgaaccgtgtttctgaattagttggtgttcctttagttactgtttctgttggtccagatcgtgaacaaactatcgtattgaagaatccttgggaaatgtaatttatgctagaacgttatactcgtcccgaaatgggcaaaatttggtcattaaagaataaatatgctgcttggctaaaagttgaaattgcggcaactaatgcttgggcagagcttggtgaagttcctgctgaagatgctaagaaaattgctgacaatgcttcttttacggtagaacgcgttagtgaattagaagcaattacgcaccacgatgttgttgcttttacgagaacagtttctgagagtttaggcgaagaaaagaagtgggttcactttggcttaacttcaaccgacgttgtggatactgcacaaggctatatcttaaaacaagctgacgaaattattcttaaagatttagagaccttaaaagaaacaattgcagatagtgctcgtaagtataagtacactgttgaaatgggaagaactcatggtgttcaagcagagccaactacttttggtttgaagttagctcgttggtatgcagaaattaatcgtgacattgaacgcttcaaggcagctgctaaagatgttgaatctggtaaaatttctggagcggttggtacttttgccaacgttccaccagcagttgaaactagcgttttgaagcaactgggattaactcagcaaccagttactagtcaagttttgccaagagacttacatgcttactacatcgctacgattgctttaattgctacaagtattgaaaattgggcaacagaaattcgtggtttgcaacgtagtgaaattcatgaagttgaagagcactttagggctggtcaaaaaggctcttctgcaatgcctcacaagcataatccaattggttctgaaaacttatgcggtatggctcgagtaatgcgtggctttatggtgccagcttatgaagatgtagctttatggcatgagagagatatttctcattcaagtgctgaacgtgtgattttacctgatgcaacaattggaattgattacatgttaaaccggtttaaccggattttgactaacttagatgttttccctgaaacaatgcttaagaatatggatcgtacttatggtttgatttattcacaacgggtgcttttgaagttaattgatgaagcaggtttgtcacgtgaaaaagcatatgacatggtgcaaaaattggctaataagtcatggcaagaacagacttcatttagaaagttaattgaagatagcgaagttatgaactacttatctgaagctgatttagatgatgcctttgattatcactatcacttgaagcatgtagatgagatttttgaaaaatgcggcttagattaggatagaaatagagatgcttttacgtatctctatttttttgttgttataaaaatattattaaaacgtaattgactatattaaactatttttataaaattttaatcaaataaaaatggaagaggtggagaaatttatgaagaataaaaagttatttgttgtgctagccttggtcttgattgctttagtaggtggaggtgtatggttttatcataatcagatgactgttcctaaaggctgggtggatagaacattggcaacagagatgagcgaaccagataataagttaagtaatccattctttttaagatttgaaaaaaaatcaagcttaccttgtggcacgagctaatggaagtttaaatagcaagaagtctggactaaatcaagaaattcaaagagcattttcgaaacgaggaaaagatttacctgaagcgggagaacaagtaaaactgggacgtgtcaagacagaaaagattaagaatggttataaaattcatacacgtaaggtaacctttattttggaagaggaaaatacattaatgaatcaagaactactaaataaacttgagcatttaactgaaatatataaatcaggtcactggggaagcgatatgccagaagatacacgtcctcaaaatttagatcctaattctgaagaaaatgctattttttatacattaccaactgctttagattatcaacgaaattctaataccttgtggaaaagtgctacggctacttttgaagataatgaaactagttttgtatttaatccacaagaagtggtagataaagattttactgaagtacaggcagccttaactagatatagtttggctttgcagaaaaataagcagacacaaatttggattaagctttgtcagactttagataataatttcaatggaaaagtaactgatttttttgcttattttgacaatgatattcaaaaagttcgtcattatatgcaggtagaaaagaaaaaggattttccatacctgtctggtaaaaaattgtgtaattactggttatacgtgatgtatcagtatacgaatctacctttgattaatactaatcaaatttatattgctacagatcggcatattattagagctacgcataaacttgggctgattacagatgaagaagtagaaaacacaaaagtacaggattatgtaataaaagcttggattgaagcactaaagggtatcaattatgtacctattgattttcaatctgcgctttggttatgggcaaggaatggatttaaagaagaattatagttaaagggaaaatatcatgaaacatgaacattcagcaggtgcaattatctggcgcaagaaaaataacgaaatccaatatttattaattcaaagtcagccttataagcaattcaagagtgcatgggctttttcaaaaggacatcttgaagctggagagacagcgcaagaagctgcaaaacgagaaatttttgaagaagtaggtttgaagcctgaatttaattttgattttagtgaaagctattcatatcaagttacttcagaaattgaaaagactgtaactttatttttagcaaaatacaatcctgatcagaaaataaaacggcaagaaagtgaaattaggcaaactgcttggctaaactatgaagatgcgcaaaaaaggattagagagcaaaactttaaggaattcagtttcgaagatctgtcttctattttggaaaaggctaatgattatttgaatggacattgattttgagaatagtcagcctgatgagattctttataattcaagtaagattatatctagttaaaattaaatacaatgtatataaattgtagtataattttagaaaagggagtgattaatatggcacatacatatagttatcgtgcagattctaaagatcatgatgaagttaaaagaattttagataatctaggtttagatatgtctactagtattaaaatgtattttaaacaaattattagacataatggaattcccttttcagtaactaattctgatacgcttacagaagatactaagaaagctcttttacttgcagaagctaaggatatgggcttaattgaagacgatactccagcctttaaagatactaataaattgattagttatatgaaaaaacgtgcaaaggaattagagtaatgtatgaaataaaagccgaagatacttttattcaggatgtaaatcgttggagtaagaaagttcctgagttatgggatgaaattcaagcaataacttcatatatgcaagaaactggagaaataccggaagaatatgatccacatcttttaactaatgaagagctgaattatgtaggatattttgagtttcatttatttgaggggaaacttgacttgcttgttattcatacaaaaaacagaaataaaaaagtctttcgattggttagactagggtctcataatgaattatttcattctgatttacgataattaaaattaaagtcgttgctatcaaacggctttttattttgctcatttttatctaaaataagacttgaatacagttaaaacaagaaagtgtatataaaaatgtcagaaccaaattatgccaagttagaagcaagcaaccctcatttagataaagagaagccatatccattagcaggaatcttggttgtagacttcactcatgtcttgtcaggtccaacttgtacaagaatgcttgccgacgcaggtgcacgagtaatccacattgagagaaaaacaggggttgatacccgccacatggggccatacattgcggatggttcaagtgaatatttcagaatctgtaatgcaggaaaagaatcaattgccttagatttgaaagatccaaaagatcatgcgttagctgaaaaaatgattgccaaagcagatgtagttgtggaaaacttccgtccaggcgtgatggcgcgtttaggttttgctccagaagaaatggtgaagaagtatcctaaattgatttttgcatcagtatctggctttggacaatacggaccttggtcaaagcaggctgcttacgataccattattcaagctgtttcaggattaatggatgctacaggtgaaccgaacggtaaaccaactcgtgttggaacttcagtttctgatgttgttgcaggaatcatgggttatagcgcgattaccaccgcattagttgcaagagagcgcactggaaaaggaaccacaatagatgtttcgatgctagattccacattttcattaatggtgcaggacttgatgcttgctcttgggccacatgaagtaccacacagaattggtaatcgccaccctgacatgtatccattcgatacctttgattgtcaagatcagctaattgctatttgttgtggtaatgaccacttatggagtttattatctaaggcattggaccatgaagaatggattaatcaagcagattttaagacaaatgatttgcgtgagaagaactggcaaaaagtaaaaaatgcaatgcaagatgtgcttaagaccaagcctgctgctgagtgggataagatcttacacgaagcaggtgtgccagctggtttagtgctcaatgtggataagaccagacgccttgataaaattattgagcgcgggatggttaagactttgcccgatggaaatgaagttttaggttcaccactcaagtatggaacttggaattcttatggattgcaaaaagatgcaccgaagttggacgaacaaggtgaacagattcgtaaggaatttgaataaaaataagcatgaaaaaagatgaagatcttctattttttgagaatcttgatcttttttaatgtattatgaagatctttctaacattaaatctttatttctagcctattctattatattctaaactttactattgttatataattaacaaaaaattaataaattataaaaaatactaggagatgaaattatgacaattggagaagcactatatgaagagcgacaaaaattaggattaacgcaagaaaatatggtgaagggaattattaacaaagggcattattctaaaattgaacgaggattagaaaatatttcaattgatacattgtttagaattattttgaaacaccatattgatattagtgactttttcaataaagtgaaagatacctattatacttttgaagataaaaaagctgaagaactaaagcaaaagataatgtacgcttttaataataatcaaagagaagaattaagaatatatttaaatgaaattttggatttaaaagagcatcagatttttaaatatcgaaccgtaattgctattgcatctttagaaaataatttagctgacttgagtccatctttaaaaaataagatagttactaaattttccgagcatgaaaattggtttgaaaatattggagcattacagttattttctgactgtatgaaaatatttactttggaacagctagactattttcttggtcaactattaaaacattatcaaaaacatacttattctgaaagtatgcaagaaagaatagcaattatttgcaataattatctttgctattgttataagcaaaaaatagttggaagtaatattcaaaatgcattgagctatttaaaagagaccgtaaaatagtttgtgtaaggatgaattattccttaatttaatttcctaaaacattagaaaaaggagttcctttctcgtatgattggtttgaacaaaaaaacatacagaaagaagaactccttcatgaatgattttaccaaaaatataactcaagctctattcaatcaagataaaattaatgatttgcttcgtcatgaaatccaacaagctgttaatgacatgttagaatctgaactgactgcctttttaggatatgatccctatgctagaaatggctggaatactggtaattctagaaatggtgcgtatttccgtaaaattgatacccagtttggatcaattgaggtacaagtgccacgagatcgcaatggtatgtttcatcaacacactctgccagactataaacaacatactgatctcttagaagatatggttataaagctttattctaaaggtgtaaccactagagaaatagctaatttgatcgaaaaaatgtatggcagtcattatagtccagctcaagtgtctaatatctctaagcaaatgattcctaaagttgaggcttatcacaagcgtaagctgagcgataagttcttttgtgtttatcttgatacaacgtatataccgttgcgtcgagaaacttttgaacgagaagcagtatatattgccattggcatcaagcctaatggtcacaaggaagttatcgactactgcattgcgcctagtgagaatattgaagtctggacggcgttgctccagaacatgaaatctcgtggtttaaagcaagtagagcttttcctttcagatggcgttgtcggcatgaaagcagcactggcaaagacctatcctcaagctcatttccaacgctgcttggtccatgttatgcgcaacatctgcgctaaagtacgcgtggacgatcgcgaggcaatcatgaacgaattcaagcagattcaccagcaagccaataaagcggctgctgttgatgtattgcatgctttttatgccaaatggaacaagagctacaatcgtgtcattagaaacctgaaagacatcgagccagacctgcttgttttttataattatcctaagcagatcagggcttcaatttactctaccaacatgatcgaatcctttaataacgtcattaagcgcaaggctaagcctaaagcggagttcccgactgaacagtcgcttgatacttttattggcatccaagcaatgagctacaatgaccgctacttcaaccgaattcacaaaggctttggtcaagtccaggataccttagaatcctattttgaataaataaaacgttaaaaaaacaatttacgagaaagatctatttacacaaaaaatttgacagtttcatttaaaaaatttagaaccgatcggtcattttttgctttataaaatatgttatgatctatatttttatttatttgaaggcaatatagaaaaagcagatgaaataaagaaattgctgattaattgtggatatcaagattgtattgaacggtggcaaatttagttgtgtctgacgcaactaattaagtaaatatgaagaaagatgtgataattgtgagcaataaaatataagtaggttacatttacctagaagggaggacaaagatgaaaaataagaaattagttgtgactgctttggtagctttattacttttagtaggcggtggagtatggttttatcataatcagacgactgtccctaaaggctgggttaatcaaagcttaatgactttggaaaaatcagataataaactgagtaattctttttatttgatgtttgacaaaaatacagcctatctggctacacgcttagggggtaatgaagaaagcaaaccttcaaaattaagtaaagatattttaaatgctttttcattgaaagaaaatgaacgcccacaagcaggtcaatgggtaaaattgggcagagttaaaaccgaaaagttgaaaaatggttacaaatttaaaacgcgtaaagtaacttttattttaaagaagactgctaatggtgcttatcaaagccaagatggtacttattggcaatttgttccagaaggagtggcagaaagtaaataatcaaaatggatataagtgatattaatattaaccaatataaaaaatatgcctaattagattttgttagtctaactaggcatatttttatttataagtattgtagaaattgagtatagtcaatcttgatcttttactttattcaaattcatctagtgcatccaaggcattttcccagtcattatttgcctggtctaattgcttttgaacagcagataatttttcttgcagtggtccaagcttttcaaatgaagcggcaatctctggatttgccatttcggtttgaatttctttttcttctgcttctaatttttcaatcttggcttcggcatcgctaactgcacgttctaatttcctcttttgagaatcgcgtgccttttgttcttggtaagatagcttacccttattttgactagcagccggagtagtttcagtttctgctttttgtgcttctgcttcttgagcagctgcagcttgcttagccttttcatctaggtagtaagaatagttaccattatagatcttagcgtggccatcgcgaacagaaataatcttgttagctaactcattaatgaagtaacggtcgtgagaaacaaagagcaatgttccatcgtaattatcgagtgcttcttcaagaacttctttagcttcaatatctaagtggttggtaggttcgtccattagtaagaagttatctttttcaagagacaaaacggtcagagtcagccgcgctttttgaccaccagataattgaccaactgtcttatcaatatcttcggcagtgaacaagaaggaagccaaaatagatcggacgtctttttcaggcattgtcttgtgacgatcccaaattgtatcaagaacagtttttgaaggatctaaactttggagttcttgatcatagtaaccaatatctaaacttgcaccatatttaattgaaccaccttttggttcaagctttttcataatggttttgagcaaggtagacttaccaattccgttaggtccgataattgccacacggtcattcttattaacttggaagtcgatatcggaaaccattaccttatctggatagccaatggttagatctttagcgatcagtacttcttttccagaaggacgttcgctagtgaagttaatacgaactttttgcttgtgcttaggtggcttgatacgctccatcttgtccaaaactttacgccggctttgggcgcgtttagtagtagaagcacgaactaggttcttttgaatgaactcttcttcctttttaatcttttcttgctgcttttcataagcggcttcttgctggctatccatcaattcacgttctttaacgtattgactgtaattacccttgaaagtagtcagctttccaaagttcagttcaaaaatttgattagctaagtgatctaagaagtactggtcgtgagaaacagtaataattgcgccttgataattctttaggaacgcttctaaccaatctaaagtatctaagtcaaggtagttagtaggttcgtcaagcagcagtactggtggcttttgtaaaagcaatttaacaaaggcaagtcgtgtcttttcaccgccagaaagagtgccaattaccttattccaagtattttctttaaaattaaaaccgttaagaatgctcttaatttcagcctggtaggtaaagccgccttcttgttcgaagtcgtaagctaattgatcataccgcttgagcaagtcttcatcttcgggatggtcggcaatttgctcttgcattttagtgatttttttatttttttcgattaagtcattaaagacagtaagcatttcatcccagattgttttgtcttcatcgaggccattttcctgggcgatgtagccgacttttaatcccttattaatagtaaattgaccactagttggttcttgttgaccagtcatgatctttaataaggtagtttttccggctccattaggtccaacaagaccgattctggcattgtcaggaaccgagaaagaaatgttactgaagataatattgcctccaaaacgttgttcgaggtcttgagcttgtgcaataatcataattattttctcctagtgcttattttaacatagtgaatcttttaaattttatgaaaatatgacctttgtgaaaattgtttcttgatttatccttaaagaatgcctattattagtttgattagtaaatatttcacattcgtattttataaaagaaagaggcctcttaatggatgaaattaagattcctaaggctactgccagacgcttgccgctgtattatcgctatttgatctttttaaatgatgaaggaaaagaaaaagtgtcttcaactgaacttgctgaagcagttcaagttgacagtgcttcaattcgtcgtgatttttcttattttggtgccttaggtaagcgtggctatggctatgatgttaagaacttgcttaatttctttaaaaagattttgaaccaagatactttaactaacgttgccttagttggtgttggtaatatgggacatgcgcttttgaattataacttcaagcgtactaataatatcagaattagcgctgcttttgacattaatcctgaaattactggaacaattatgtcaggtgtgcctgtttatgatatgagtgaaatgaagaagcagcttcgtgaacaacaaattacgattgcaatcctttgtgtaccgcaaacagcagcccaaaagactgccaatgaaatgtttgatgccgggattaaagggatcatgaactttacgccacttcgtttatctgcaccttctagtgttcgtgtacaaaatgttgacttggcaactgaacttcaaactttaatctacttcttggattcagataaagataagaacaaaaaataatttactattaatatagcttttgcacaagcttaactaggcttgtgcatttttttatacatttttatttgtaatcagagagaaaataattttaagataaataggcatagaatttttaaatttagaaataaggtagataaaatgattaaaaagatggcagtttattgtggtgcacgcttaggtaaccgccctgaatatgctaaagctgcttatgaatttggtaaaaaaatggcagaccaccagatcgagctagtctatggcggcggtaagtatggtttaatgcgagccgttgctgatggagttttagaaaatggcggtattgttcatggcattattactgaagaattaaaagatcgtggtgcagcttacgataaggtgcaagattttcgcgtggtcccaagtatggataagcgaaaagatacgatgatgaacttggctgatgagatggtagctcttcctggcagtattggtactttagaagaaataagtcaggctatttcttggactgcaattggagataatgcgaagcctgttgctttttataactatgctggtttttatgattatttagataagttgttgaagcgcatgaatcaggatgattttttagaaaatatttacttagatacggtctattttggaactgattttgataagattttgcagtttatggaggattatcaggctccggcttatcgtgaatattgatttattaaactaaagaagcataatctaaatttccccctcgtatttaggttcatgcttctttttttgaccacttagaactttaaaacgaccacttagtcaatttcactagattttaatcttatattcatgtttaatataaatatcaagaacgaaacaaggaagtgagaattgtgaaagttaagcttgaacttgatccagatcagcaagagacagaaataacaattcatgctaaaagcttaacgcctgaagtagaaagaatttatcatcaacttcaaactgattcagagcatcctgatcaaattgaggggatgatggataatacttcctattatttaagtattaacgatattctcttttttgaaacagacgctaagcaggtaatggcgcatacgacgaggaatgcatattttgttaagtataaattatacgaactagaaaacttattaagtggacagttcatgcgagtatcgaaatcgacgattttaaatttagatcagatttatgctgttactaaatcgatctctaattgtcagattaagtttcatgattcatataaaactgtctatgtttcaagaagatattaccgagatttaaatgaaagattaaaagagagaaggacattatcatgagaaaggccagttttggaagagttctttgggggttaggtttgcttgcggcagctgcgtttttagttttagatcagctccacttgatgccactagaattaggcttttgggcaattttttggaccgtggtctttggagcaaccttaattacttctttaattaataaaagcttaggaggcagtattttttcaattgcattcctattaattatttatgctaagccacttcatattgaacgtattgttccttggacagtacttttagcagcgtttttaatctggggaggtttgagattaattttcaaaaaaagctggaaaccgactgtgattattaatggtgaaaaagttaacgctaattggtcagatttgaaagctccacataaatttaaggctgaacatgttttttctgatacgtctagttcagataatgacgacaatatcgtaattagtgaaaagttgtcttctacttcgcgttacgttcattcacaacacttagaaacggtgactgtgaatgtttcaatgggggatgtcaatgtatatcttgattcagctaagcctgctggggatgaggtacttgctaacattaatatgtcgatgggagatataaatatttacattccaacttcttggcgagttgataatcaacttgaacataaatttggtgatttcactattgatggtgatcaaccagcagaaggtccaacattagtacttcaaggtcgtgctaatatgggggatgttactattaagagagtttagaatagaaaaatcgattagctctcatttgaagtaaaaattaatttgctgtaaaatacttgtagtaaaaaaaagagagctactggtaatagctctccgaagcacaagccgctaaaagtgcggtggcaaaattattattagcaaactaaaaagtcgctttcaactctgccaaaagtcatcaagcggcttttttgtttgcttattttttcttccacaaatcgtggatagcctttatgagcttttttaccgcttttaccaacttggtcatatctcgcaccagctttaccaataacaagacaatacaatccaagagccctaattttataaaaaattactggcaatccatattgaatttttaaataaatatcaagtaaattagcactttttagcactcaagcaagaaaagtgctaatttttgtgcttaaatacttgcttttcttttacaaacaaggtactatcgtaattgtaagttagcacttatgagatatgagtgctaaatgatgtaataatagattaaatatgtacaggagggactaacgtgttacaaccaattggtgatcgcgtaatcgttaaagtaaaagacgaagaagaagaaaaagttggaggcattgtcctggcttctaacgctaaagaaaagcctcaaatgggcgaaattattgccgtaggaaatggtaagcgtaacgcaaacggcgacttaattcctatgtcagttgcaaaaggtgaaacagtattctttgataaatactctggcactaacttgaaatacgaaggcgaaaagtatttagtacttcgtgaaagcgacttattagctgtcgttaagtaattaaattagaaataaaaggtggcatataaatatggctaaagacattaaattttctgaaaatgcaagacgctcattattaaagggtgttgataaattagcagacactgttaagacaactttaggacctaagggaagaaatgttgttttggaaaagagctatggtgctcctgacattactaacgatggtgttactatcgctaagagtatcgacttaaaagatcactttgaaaacatgggtgcaaagcttgtttctgaagctgcacaaaagactaacgatattgctggtgacggtactactactgctactgttttaactcaagcaattgttcgtgaaggtatgaagaacgttactgctggtgctaaccctgttggtattcgtcgcggtattgaaactgcaactaaagcagctgttgacgaattacacaagatcagccacaaggtaagcactaaagatgaaattgctcaagttgcttctgtttcatcagcttcaactgaagttggtaacttaatcgctgacgcaatggaaaaagttggtcacgatggtgttatcacaattgaggaatcaaagggtattgatactgaactttcagtagttgaaggtatgcaattcgatcgtggttacttatcacaatacatggtaactgataacgataagatggaagccgacttagacaacccttacattttgattactgacaagaagatttctaacattcaagacatcttgccattacttcaagaaattgttcaacaaggtaagagcttattaatcattgctgatgatgttgatggtgaagctcttccaactcttgttttgaacaagatccgtggtactttcaatgttgttgctgttaaggctcctggctttggtgaccgtcgtaaggcaatgcttgaagatatcgctattttaactggtggtactgtaatttcttcagacttaggtcttgaattaaaggatactaagattgatcaattaggtaaggctggcaaggttactgtaactaaggactcaactactattgttgaaggtgctggctcaaaggatgcaattagtgaacgtgttgaccaaatcaagaagcaaattgctgacactacttcagactttgaccgtgaaaagttacaagaacgtcttgctaagcttgctggtggtgttgctgttatcaaggttggtgctgctactgaaactgaattgaaggaaagaaagtacagaatcgaagatgccttgaacgcaacccgtgctgctgttgaagaaggctacgttgccggtggtggtactgcattagttgatgttatgaagtccatccaaggtaatgttaagggtgattctcaagatgcacaaactggtgtaaacattgtgatgaaggctttaggtgctcctgtacgtcaaatcgctgaaaacgctggtaaagatggtgctgttatcttagatcacttagaacacgaagacccagaaattggttacaatgctgcaactgacaagtgggaaaacatggttaaggctggtatcatcgacccaactaaggtaactcgttcagcacttcaaaatgctgcttcaattgctgccttgttgttaactactgaagctgttgttgccgatgctccagaagatgacaagaaccaagctcctgcagctccaaacccaggtatgggaatgggaatgtaatttaattcctgacaaaaaataagaaagaattattataataatcctattaatttattgataggcataatgcaaaagaatcgagcaatcgctgatggttgctcgattctttttttgtgggctttgtaggattaaggcttatttctttaggttgtaagacgataaatataaaaaaatgaaatcgaattcaatattagtatagaatttataaaaataagtgttattatatagttgttgattggaaatgttattttattaaggaaatattcatgcaggtctattggaggtaagttgtatgagtagtaatatgtttggtgataaacacaaccattatagtattagaaaactttctgttggggcagcatctgttttgattggtgccacaatttacttgggaggggtaaacgcccaagctgtacgcgctgatagtgttaatgaggatgctactgaacaagtagagaagaaggatgaagctaatgttaaggcagcagaagtaaagactactgaacaaaagcaagaaaataataagacagcggtttctgctactaatgaaagtgctaagcaaaatgtggctgaaaacacatcagatagtaaaaaggttgcatcaaatagggatgttaatgttactaaaaacgatgtaactactgatgaaaaagcagctgctcagtctagtgttcaaacagataaagatgttaatgcgaataagttgaacactaatactgtttcagtgaataagcttcagagaaatgttaatgttgctggacttgctgagagcaagattactagtgagataaatagtactctttcggttcgagaatcaatgcaacaaaaggcagtgagcttaaaagctaatgaaatagcccgtacagttataatgaataagcctgcaggtcctgaccaaattacccaatctgtaaaattaggaactatgttagggagtagcaatggacaaattatagatggaaaaactactaaaatttatactgcaactgtcatagctgttgggtcaagtacagatatgaaaaagtatagagtcacagttgattctgatactggtgaaatattagcaggtcaggatttgtatgatacatttatgaatctccaaccaagtgattttaaagttaacctagacgctatagatcaaagccaaattgacgtacccggttatacttggaaaattaccagtgcaactccagcaggagctaatattgggaaggaagattatacatttggtaatccgcaaacgattacgatagattatactcgcgatgtcgaaggtaatataaagaaaaaggttacagaaattaccgataagttagtaaataatcaaatgacgaccgaaccagctagaacagttattctgaaaaagacaacaactggagctgctaatgatgaaacaattgtacaaaaagctgatattagaggattagctagaacaagtagtaaaacagtagctggcataactgaaaaaaagatagaagtagctattgcgccttatgttgaaccggataaaccttctagtcaatattacaagcagtatactatcacgtttaatcccgataccggacaaataatttctggtcaaaatgactatgatcaattaatggcattaaaacgtagtgattttaaagcggatttaccagccattgaagatagtcaaattgacgtacccggttatactgcgataattaccagtgcaaccccagcaggagcaggattagaagctgaaacatatacatttggccatccacaaacgattacgatagattatacaaaagtaaaacacactgtaacttatcaatttaaagatccgtttggcaatcaagtgggtacttcggtaccagtaactggtgcagttggtagcaatcaatcggttaacttaactcttccagatggttaccaacttgcttcaggtagccttccaactagtgttactatccctgaaagtgataaaattattccaattcctgtaaaacatcaacttacaattactctttcaggtgaaagtgtatttaattatgcggatgataactggcaaaatttagttgagactaatgaacttcctgctagtggctattatgttgagtttaatgatgctaacgctagggtacaactgaatgatggcgatgtaacgtataatgaaaatagaaatgccggaacttacacagttagtctaaccgagaagggtcttaatgacattaaggatcaatcgcatgataacttcatttatccagatcttaaggatgtcaaaagtgaggccaagtttattataaataaaggaaataaaacaatttctcttatgggaggagatacgaaggtatttgataatacttcgactcttccagatcagggtactttctattctggactaggtcttgcggataacgatcaaggtagaatatcagtttacaattcagatggtaatcctagaacaattcaattaacaccagctgatgtagaattttggtttaatggacataaaattgctaaagaccaagctaagaatgttggaaattacaatcttcgtttaactgatgattttattaataaagttaaagctgctgatggtaataatgggaataactacgagtgggcttatggaactaacactcctactggtagtgatacttacactgctgactatgtaatttatcaagcaaccggtaaggcaaagttaagtggtaacaattctaaactttatgatggcaatgctgtaactactgatgatgtcaataagggtagaaagattactattgatttaactttaccagtctataaacaagctgatgaaccaggtgatgagcctcaattattgggaactgttgatttaggtaagtatacgcttcaagatggcgactatacttgggctaatggaactgcgccaactaaaggtggatcttacactattaatttgaacaaggataagattttagcccacttacaagatcgtttggttgctttagcaggaaagggaacagatcctgacgattctactaagtctttaagtaacgtaaccatttctgctgatgatatggctggtcaagcaacatttgccatcgaaacaactacaacctaccaatttgtagatgatgacgataatggtagtaaagtaggtactcctgtaagtaaaacaggtcttaaaggtgagagttcaaatattagtctaactgttccaactaactatgttttagctgctggtcaaactttaccaactagtgtaacttttggtgatactaacactacagttgatattcacttgaagcatgcaactaagactgtagataagaataatgttccagatggttacactaaagatgattttgctgagactattaatcgtacaatcactgctaaagagccaactggtgatgttgatttaagtcaaacaactgaattgacgagaactggaacttatgacgaagtaactaagaaagttatttcttacggcaactggacaactggtaactttgacgaagttacagctccagaagtagcaggttacacaccaagtcaagcaaacgtagctgccgtaacaggagtaacacctgactatgttgatcctaaggttgtaattacttatgcaccaaatgatcaaaccggtaagatttcttacgttgatgtgaatactggtactgaggtaggtaatactccattaactggtaagacggatgaagaagtaacaattaatccagttgcaccaacaggctggaagattgttgacggtcaaagcatccctcggactgaaaaggctactccaactggtattcctcccgtaactgttaaagtagaacacaagactacagttgttccaccaacagatccaaagacaccaaaagataagttgcctgataatccagacaagcactatccagatggcgttggcgaaaaagacttgaacaagattattgttcgtcaaatcacagttgtaaagcctgacggaacaagagaaaaacacgatcaatcagttaaattaactagaaatgcaacagtcgatgaagtaactggtgaagtaattaaatacggtgactggacaactagcaactttggtgaatacgatgctccaacagttccaggctacaccccaagccaagctaaggttgagggtgtaaaagtaactgctgatagtgactttgctccagttacaattacttatactgctaaccctcatactttaaacattaattatgttgataaagatggcaataagattggcaattcttaccaagttccaggtaggactgacgaaacagttgctgttgatgttccaggacatgttccagcaaactgggaacttgtaccaaaacagaagtacactacttcaattacatttggttcagatgatcctcaagatcaaaactacgtaattcaacataagactactacgaccgatggtagagatcacaaggacaatcaagacctataccgtgaagttacgagaacaattttaatgaaggttccaaatgcaacgagtcaaggtagagaaactgaaactttgagtttctacagaattaagactcacgatgaagtaacaggtaaagatacttatagcgattgggcttcaaatgtcacaggtgataagattgcctttgatgagtttgatgtttcaaagactaatgatggtaaagaaatcgctgccggctacacaccaacttcaaatgatgtagtcttagaagataagaatggcgataaatttgtaccaagtcaatcagccttgaagaatggagttccagcagacagtttcactgttgaagttgcttacacaccaaatgcccaaaggacaactgtaacttatgttgatgagaatggtaaagaaattaccaatccagatggcagtgtaattcctggcagtcactatgatttaactggtgttactgaccaaagcaatgtaccaactaatatccaaaataatgttccaactaactggcatattactgatccagaagttccagcaacgattacctttggtgcagatggtcatactccaatcaaggttcatgtagctcacaacactaagcctgttgataagaacgatgttccagatggctacaaggaaagtgactttagtaagactattaatcgtacaattactgctaatgaaccaagcaagagtgttgatttgagtcaaaagactgaattgactagaactggtacttacgatgtagtgactaagaaggttatttcttacggtaactggacaactggtaagttcgatgaagttaaagcaccagaagttgctggttatactccaaatccagcttctgtaaacgcagagtctgtaacagctgattatgttgatcctaagcttgtaattaattacacaccaaatgatcaaactggtaagatttcttacgttgatgtgaacactggtactgaagtaggtataacaccgttaactggtaagactgattcagatgtaacaattactccatctgctccagcaggctggaagattgtcgatggtcaaaatattcctactactgaaaaggctactccaacaggaattgctaccgtaactgttaaagttgaacacaagacaacaacagttccaccaacagatccaaagacaccaaaggataaattacctgataatccagacaagcactatccagatggcgttagcgaaaaagacttgaataagacagttgttcgtcaaatcacggttgtaaaaccagacggaactaaagaaagtcacgatcaatcgattaagttaactagaactgcaacagttgacgaggtaacaggtgaagtaactaaatacagtgactggacaactggtaactttggtgaatacgatgctccagttattccaggctacactccgagtcaagctaaggttgaaggtgtaaaagtaacagctgatagtgactttactccagttgagattacttacacaccaaacgcacaaaagacaaccgtaacttatgttgatgagaatgataaagaaattactaatccagatggcagtgtaattcctggcagtcactatgatgtaactggtgtaacaaataagaaagttgatactaatattcagaagaatgtaccaactaattggcatattactgatccagaagttccagcaactattacctttggcgcagatggtcatactccaatcacggttcacgtagctcacaacactaagcctgttgataagaatgatcttccagataactacaaggaaagtgatttcagtaagactatcaatcgtaccattactgcaaaagaaccaaataaagatgttgatttgagtcaagaaattgaattaacaagaactggaacttacgatgaagtaactaagaaagttatttcctacagtgattggacaactggtaagttcgatgaagttaaggctccagaagtagctggttatactccaagtcaagctaaagtagacggtgttgataaagtaacagtagattatgtagatcctaatgtggtaattacttacattgaagatccagttggtcaagatatcacagtgaagaagggtgacactccagatccagaagatggcgtcaagaaccatggtgacttagacaagattactgatccaaagcacccaggtaccaagacaacatatacttggaagaagactccagacacaagtgtagcaggagatgtcccagcaacagttgttgttcattacccagatggttctgataagccagttgatattactgtccatgttgtcgatgatactccagtagtaccaaccaagaatccagatccagttggtcaagatatcacagtgaagaagggtgacactccagatccagaagatggcgtcaagaaccacggtgacttagacaagattactgatccaaagcacccaggtaccaagacaacatatacttggaagaagactccagacacaagcgtagcaggagatgtcccagcaacagttgttgttcactatccagatggttctgataagtcagttgatatcacagttcatgttgtcgatgatactccagtagtaccaaccaagaatccagatccagttggtcaagatattcacactccacaaggtaaagttccaactcctgaatcagctattactaacaaagataagatgccagatggaactaagtacacttggaaggaaatcccagatgttaatactttaggtaaacatcctaatgtagttgttgtaacttacccagatggaactgctgttgaagtaaaagttaatgtctttgttgatggtactccagaagtaaagaaagaaactaaagctccagtagttaagaaacaggttgttgaaccaacgaaagttgaaacaagacaaaagttggttaataattatgtggctcctcgtgcagtagaagttcaaagagctcaagctaaaggtaagcgtcaattaccacaaactggtgctaaagaaaatattgcaagtgaagtactaggcatgctttcagtaggcttaggtgcattaactgcaggatttgcttcaaagcgtcgtaagaagaatagatagtttttaggataactaattaaaaacactccatgatttttcagaaatcacggggtgtttttgtgtagaaaattatatttttaattttaaaataattttacgtgatataatttaataaaaatattatattaggagggtaaaaagatgatcatggtagtaacgaacgctcatcaaaacgtacaaatcactagataatagatgagcggaaaataattaaatttcattttgttaagtccgttcatcgaggaggcaaaatgaaacatttacaaaaattaaaccaatacttcaaagaattaactcgaacttatcacctgttctttaaatcagctcctttagttgccacatgtgtcttattacttgcaccgcttcaagcagtaattcctctacttgctgtagcagcaggacaaaaggtaattgatcaagttactaatcattcaccttttatggaaatgatcattgtttggattgtggcgacgacatttcaacaatttttaccatccctttcgacaatggttcaaggagttctaactgataaattaacaggctttatcaatattagcttgatgaaaaaatcagcagacttacaatcgatcagtatttttgatgatagtaagtattttgatgatttacaaatgctcagagatgatgcaagctggcgtccggttaatttaattgtttatggagtatcagtcttacagtcatttctaacgctagctttcatgctaatatatttggcacgatacaattggtggctagccttgcttttattagtagtaatggtaccgcagagtctttcttactatcgtattcagcagcagtcatttgaaacaatggttgaaagaagcaagaatgcgagatacttgcactactatagtggattgttgcttgatcgcagggatgctaaagaagttagacttttcaacatgtttcctaagatcatcgaaaaatatacaagcttatttgaacaaacgaaaaaagacgttaaccaaattcgtaaaaagcaacttgcgactagttcactgtttgttgtattgactgtcggagtgtttggctatggcttttattggtttactaattcagtaagaacaggtgcattagaagttggcgtattattgatgtttgtttcagtaattggctatatttctactagcatggctcgggtagtagaagacagcagcttgttatacgattcattattatgggttgaaaaatactttaagtttcttgagtatcaagatgatttcaaaaacggtggtcagaactttcctgatgattttgatgatattaatattaagaatctgtcttttacatatccgttttctgatactgaaattttgcacaatgttagtttctcagttaaaagtggagaaaaagttgcaattgttggagaaaatgggtcaggaaaatccactctggtaaagctattaatgcgtttttatgacccgactaatggaaaaatttctgttgataattatgatttaaaagactttaatatcttcgacttacataaaaatttatcagctacttttcaggatttttctcgctttaaattaacgcttaaagaaaacgtgattaccggatattcattcaataaaggtagggtaaataatgttcttaaagcagcaggattgggtgatttgctagctaatgatcatcttaatctgaatacgatgctggctaaagatttcgaaaatggaactgatttgtcaggtggtcaatggcaaaaaatagctttagcacgagacttatatgctaatggcaagattgaatttttagatgaaccaacggcagccttagatgctaagagcgaatcggaaatttatcaacgctttttgaaagaaaatgataaaaagacaattttctttgttactcaccgtttgtcagcagttagatttgctgataaggtattatttcttgacggtggaaaagttagtggatttgacacgcatactaatttattgcaaactaatccaaaatataaagaaatgtacgacttacagaaaaatgcatatctgtaaagttaaattttgatagataataaaattcttcatgcaagcaggcatggagaatttttttgccttttaacagttaagatttttcagtgatttttacgttataatagaacataggtttttggaagaaaggatatttggtaacgaatggcaaaaaaagatacgacaccaatgatgaagcaatactacgaaattaaggaacaatatcccgatgcgtttttgttttatcgtgtgggcgatttctatgaattatttgaagacgatgcagttaagggtgcacaaattctagagttgaccctaactcatcgttcaaataaaactaaaaatccaattccaatggcaggagttcctcacctagctgtggatacttacgttaatactttggtggaaaagggatataaagttgcgctttgtgaacaacttgaagatccaaaaaaagctaaaggaatggtaaagcgtggaattattcagttaattacgccaggtaccatgatgcacgaacgtcctgaccaagcaaaagacagtaactacttaacgtcagttatttcaacaaattctggctttggcctagcttacagcgacttatccactggggaaactttttccacacacttaactgactttgaaggtgtcgcaaatgaattattatcccttcaaacaagagaagttgtgtataacggtcatttaacagaagcaaacaaggactttttaaagaaagctaatattactgtttctgaaccggttaaagtagagggcgaacatgctgagatttcctatgtaacgcaaaatttaactgacgatgcagaaattaaggctaccaagcaactagtagcttatttgctgtcgacgcaaaagcgtagtttggctcacttacaagtagcacaaagttatgagcctacgcaatacttgcaaatgtcgcatactgtgcaaacgaacttagagttgattaaatcagctaagacttctaagaagatgggatctttattctggctcttagataaaacaagcacggcaatgggaggcagacttcttaaatcttggattgaacgtccgcttttatcagttactgaaattactcgtcgtcaagaaatggttcaagcgcttcttgatgattacttcaccagagaaaaagttatcgacagcttaaagggtgtgtatgacttagaaagattaactggtcgaattgcttttggttcagttaatgctcgtgaaatgctacaactagcgcattctttaggtgcaattcctgatattttgaattccttgcttgaaacaaataatccacatctgcaaaactttgctaagcaaattgatccgttaaagggaattcatgatttgattgttaacactattgtggataatccaccacttttaacgacggaaggtggcttgattagggaaggagtttcagaccaattagaccgctaccgtgatgccatgaacaacggtaaaaagtggctatctgaaatggaaagtcacgagcgtgaagtaactggaattaacaacttaaaggttggctacaacaaggtctttggctactatattgaagttacgaattccaataaagataaggtgccaactgatcgctacactagaaagcaaacattaactaatgcagagcgttatatcacgcctgatttaaaggaacatgaatccttaattctagaagcggaagctaagtcaacaggcttagagtatgacttgtttgtaaaattaagagaaaatgttaaaaagtatattccagctttacaaaaattagctaaacaagttgccagtttagacgttttgacgaattttgcgacagttagtgaacaaaataattatgttcgtccagactttacggttgataagcaagaaattaatgtagttaatggtcgccaccccgttgttgaacaagtgatgacggctggtagttatattcctaatgacgtgaagatggatcaagataccgatattttcttaattactggacctaatatgtctggtaagtctacttatatgcgtcaaatggccttaattgcaatcatggcgcagattggctgtttcgttccagcagatagtgcaacgttgccaatttttgatcaaatctttactcgaattggtgcagcagatgatttgatttctggtcagagtacttttatggtagaaatgagcgaagctaatgacgctttgcagcatgcgacaaaacgttctttagttttatttgatgaaattggacgaggtactgctacctatgatgggatggccttagccggagcaatcgtgaagtatcttcatgataaggtcggggcaaaaacgctctttgcgactcactaccacgaattaactgacttagaccagactttaaagcatttaaagaatattcacgttggggcaaccgaagaaaatggcaagttgattttcttacataagatcctaccaggaccagcagatcaatcttatggtattcacgttgctcaattggcaggcttaccgcataaggttttaagagaagcaactacgatgcttaagcgattagagaagcaaggagcaggagagttgcagccagctagcgagcaacttgatctctttactgctgaagaagcgagtgtacctgcaatttcagatgatgaaaaagatgtcttggatgatattcaaaatgtatatcttgctgacaaaactcctttgcaggttatggaacttgtagctcaatggcagcaagagttgaaagataaggattaataatcatgagcaaaattcatgaactttcacctgaattaactaatcaaattgctgctggtgaagttattgaacggccagctagtgttgttaaagaattatgtgaaaattcccttgatgccggtagcagccgcattagaattaactttattgatgcaggcttaaagcaaattacggtgcaagacaatgggagcggaattgcaaaagaccagcttaatttagcttttactcggcatgcaacaagtaagattgcaacagagcgagatttatttaatatttctactttaggctttcgcggagaggctttagcgtcaattgcggccgtttctcatgtggaagtaataactagtagcgataatttaggcggagttcgggcaatttttgtaggtagtgaaaaaaagctccaagaagatgctgcttcaccaaagggaaccaagatttcagttagtgatttattttttaatacgccagctaggctgaaatatttacgctctgaaagaactgaaactctaaagattgtcgatattgttaaccgacttgctttaggacatcctgatgtttcttttactcttactaataatggtaagatcttattaaagaccaacggacgtaatgatttaagacaagatattgcaaatatttatggccgtcaacttgcagaaaagatggaggttttgaaaggaagcagtcctgattttaagattaccggcttactttctgatcctaatacaactcgttcaagtcgaaactttatttctttattattgaatggccgttatataagaaattaccgtctaactcaggcgattatagctggatatggcagtaaattaagaccacgccgttatccaattgctgttgtaaacattgagctggatccacttttagtggatgttaacgtccatccaactaaacaagaagtgcgcttgtcaaaggagcaggaattagagcgcctgttaactacaagtatttcagaagccttagatcagaatagtcagattgattcaggtttgaataatttattaactcctaaaaagtcgacaaatattgaccaattaaaatttaacttaaataaagatgtggttgatactgttcgtccagtcgaatttactccgcaagttgaagctgataaaagtgctgaagttcatgaaacagcggcaagttttgttagcttagataaggttcgtaatgacgataaatatgtgattactgcaacttgggatgaaaatgtggataagcagttgcagctaagtccatttgatgaggaaaaagatctgcaaggaaaagatgatagcattatttcttcaggggatgaaatcttagctaatagcctacctgaattaatttatttaggtcagactaaatcatatttagttgcacgtcatgatgaggacttatacttaattgatcaagtagcagcttatcgacgcttagcttatgatcaaatttttcgtgatttaaatagtgaaaatatttctcagcaaggtttacttagtcctttaattttagattttagtaatgttgactatttgaagttaaaagaaaatcttaataatttacaagaattagggatatttttagaggattttggtcaaaatagtctgatcttaagaacctatccaatttggctccaacctgacgtagaaaaaaatgtccgcatgattttagatttatatttaaatcaaaatgaacaagattttaccaagcttaaagcacaaattgctggtgaaataacgctgcgtcaaagtactagaagaagaaatctaaatccagttgaagcacaagaattattgaaaaatttgagaaatagtagtgatccttatcaagattttgagggaaaaattattattattcagttaagtgaaaatgatctcaataagatgtttaaaaaagatgagtaggtaaaatgtttgaatatctcaaaggaatagtagcaaaaatcgatccagcttatgtagtattagatgtaaatggcattgggtataagatcctttgtcccactccatatagctatcaagaaaatcagccagcaactatctatgttgaacaagttgttagagatacagggattaccttatatggctttttatctttagaagacaaagaattatttttaaaattattaagcgtttcaggaattggaccaaagtcagctgtggcgattatggcggctgaggatacagattcgttagctagcgcaattcagaatggagaggtgaaatatctaactcgttttccaggggttggaaaaaagactgcttctcagattgtcttagacttaaagggaaagttaggcgactatgtaaagaaatcagcagttgctaccgatcttacaccgagcctgcaagatgctttgcttgccttggtagcacttggttatacccaaaaagaagttgaccgaattactccaaagttagcaaaattgcctgaaaatactgctgatggttatattaaagaggctttagctttactacttaagaagtaaaagtaaaaattaggtaaggataaggaagtgaaagatgtgaatgatgaagaacgaattataggcgctgagagtaatgaagaggatgaaacgattgaattgtctttgcgtccgcaactacttgctcaatatattggacaagataaagtaaagagcgagatgaaaatctatattaaagcggctaagcagcgagacgaagctttagatcatgttttgttatatggcccacctggtttaggtaaaactactttggcatttgtaatcgctaatgaaatgggcgttcacttaaagagcacctcgggtccggcaattgaaaaggcgggcgatttggtggctctgctttcggaattaaatccaggggatgtcttatttattgatgagattcaccgtttagcaaagccagtcgaagaagtcttatattcggcaatggaagatttttatatcgatattgtggttggagaaggacaaacaactcatgctgtacacgtgccacttcctccatttactttgattggagcaactaccagggctggtcaattatctgcgccgctaagagatcgttttggaattattgagcacatgcagtactattctattgatgatctagaaaaaataattcaaagatcaagcgtagtctttaacactaaaattgatccagaagctgctattgaactagctcgacgttctcgtggaacgccgcgtgttgctaaccgtttacttaagcgggttcgcgattttgcggaagtaaagggagaagaagctatttctttagcaactactaagcactcacttcatttgttagaagttgacgatgaaggtttagatcaaactgacagaaaacttttaagaatgatgattgaaaattatggtggcggtccggtcgggattaagactattgcagctaatgttggtgaagatacagatacaattgaagaagtttatgaaccatatttacttcaaaaaggattcattactcgaactcctagagggagaagcgttacgcaaaaagcttatttacaattaggatatccaccaaaaaaagcagagtaagtttttagttggaccaaaaatacggtataattattatttgaaagttaattaataaaaataatgaggtgtaatactttgaatacatttttcttagcacaaagtgctgctggtatgaataacatgttcatgattattgcaatgattgcaatttttgtcttcttctacttctccatgatcaagccgcaaaagaagcaacaacaagaacggatgaagatgatgtctgaacttaagaagggcgatcaagtaattatggttgatggccttcatggtaaagttgattcaatcaatgacgcagataagactgttgtgattgatgccgatggaattttcttaacatttgaaagaatggctattcgtcgcgttcttccaactgctgccgctcctgctaaagatgttgaagctaatgaagcaaaagaagaaaaagttgaaacagaagaaaagcctactgaaagcagtaaaccggaagaaacagcttctgataaaactgatgatactaattctgaagataaataaaaaaacgtccgcaaggacgtttttattttttcattgtcatggcttagtattgtaaaatatgaattggtaaagtaaattttaataagtttaataggtaggtagttagaatggaaaatattccagttgtcatgattatttttggtggctcgggtgatttagctcatagaaagctttatccagccttattcaacttatatcaaaagggattaattcatgatcattttgccgtaattggtacagctagaagaccatggagtcatgaatacttacaagaacaagttgttgaagcaattaaagaaagcaacagcagctttgatgagaaagatgcaaaagaatttgcttcgcatttttattaccaatcacatgatgtaactgatgttgatcactacattgctctaaaagaattagctacaaagcttgataagaaatatcacgcagaaggcaaccgtattttctacatggcaatggcaccaagattttttggcacaattgcaacccatattaacgatcaaaagctagttgggagtggttttaaccgcttggtaattgaaaagccatttggtcatgatctagcttctgctgaaaaattaaatcaagaaattagcgaaagttttgctgaagattcggtatatcgaattgaccattatctcggcaaagagatggtccaaaatattatgccgcttagaatgactaatccaattgttaataatatttggtgcaagaaatacattgctaatatgcaagttacccttgctgaaagcttaggcgttggtactcgtggcggatattatgagacttctggtgctttacgcgatatggttcaaaatcatatttttcaaattattacccttttagccatgccagaacctaaagccttagattcagatcatattcatgaagcaaagcaagaactactcgatagtttggtcattccgactccagaaatggtaaagcagcatttctcacgtggtcaatatttagcaagtgatgatgaagtggagtatttaaaggccgatcaagttgctcctgattctaaagtagaaacttttgttgctggcgaagttaacttcaagaagggtcccgtagctggtgttccaatctactttagaaccggtaagaagatgaaagacaaagtttctagaatcgatattgtactccaccacatgaataatttatacggcaatgcacattcaaataatatttcaattattattgatccaagaagcgagattttctttactattaacggaaagaagattactactgagggcttaagaagagaaaatctcagctataagttctctaaggaagaaatggctcaagtcccagatggctacgaaagattacttcacgatgtctttgtagctgatcgtacaaactttacgcactggtctgaattaaagcaatactggaagtttgttgatgcggttgaagctgcatggcaagatgaaaataaagatattaagcaacttgagcaatatccaagtggtgaatttggtactgaatcgagtaaccatatttttgaaaaagatactgaacactggatttaccgttaatggatttactgcctaaaaataatactaagcgtaagattattcatctggatatggatgctttttatgcgtcagtagagattcgtgacaatcctgctttaagaaataaggctgttttaattggcggcgatcctaagaaaaataggggacacggggttgtggcaactgctaattatgtggctcgtcaatatggtgctcattcagctatgccgacagctaaggcaattaggttaattccagcagaaaaactggtaattattcaaccacattttgaaaagtatcgggctgtttcagctgaaattcatcgtttaatgcataaaatgactgatcgagtagaatcggttgccttagatgaagcatacttagatgtaactgagaataaacttcatctagctgatcctgttcggattgcgactatacttcaagagcaaatttatcaaaaggttggattaacaagctcattcggcgtttcttacaataagttcttagccaaaatgggatctgaatatgctaaaccctttggcagaaccgtaattcggcctgaaactgcacttgatttcttggcaaaacaaaaaattgaaaagttccctggaatcggtcctaagacgcaagaaagattagcagagatgggagtctacactggagctgacttaataaaaattccaacggatgtgttgattaagaaatttaatcgcatgggctatttgatcgcccaacatgcacatggcatcgacttacgagcggtagttactgattcagaaagaaatcgaaagtcgattgggattgagcgaacttttaatcagagtttgtttgatgaaaatgaagctttaactagactgcgagcttatagcggtgaacttgagaaccggttgaaaaagcgacattttcttgctaattgtgttgtcttaaagattcgcgatgctaattttaagacaattactaaaagaagaaagctaaaacaaggcacgaatgataaaattgttatttacgacactggtcgtgttttgtttgaaacagaaaaagggatgctcacaactggagtacgtttattaggtcttacggtaaccgattttgaagaacatccagttgagaatttatcgttagatatttttgaaaacaagtaatgataaaataaatttagtaaacaacaaggagaaaagattaatggcaacttttgatgaaatttatgaaaaaataaaagaatacccaacaattattttgcaccgtcacactagtcctgacccagatgcaattggttctcaagctggtttagcaagatcattgagattagcttttccagataaaaagattctttgtgctggtgaaaatgacgaaggtgacctgatctggattaataagatggatgaagttacacctgaagattatcaaggtgctttagtaattactactgatactgctaatactccacgtatttctaacaagaattacgataagggtgattttttgatcaagattgaccaccacccagatgtagatccatatgcagatatgagctatgtagatccagacgcaccagctgcttcagaaattgtttttgactttttgaaagcagagaacttgccagttactaaggaagttgcagcagctttatatgcaggtattgttggcgatacaggtagatttatgtatcctgaaacttcagctcacacttttgacgttgcagctgaattaactaagacaggaattaacattactgatattgctagagaaattgcggatgttacttttgatgaagcaaaattgcaagctttagcaatggataagatggaaattaacccagttggagcagcttacacaattttgatgcaagacgatttgaagaagatgggcttaactgatgaccaagcaaacgttgctgtttcaactccaggtcggattaaggacgtgttagcttggaatgtatttgttgaaaagccagatggtactttccgcgttcattatcgttcaaagggtcctgtaattaaccatttagctgaaaaacatgatggtggtggccatgcattagcatctggtgccaatgccaaggatatggatgaagtaaaacaagtctttgacgaagtagtagaagtaacaaagaagtacaatgaagaacatggcacaaacaaatagcatatttcaaagtgaaaagattagaccagaattgcgagctggtctagaaaaaattaattttagcaaaccaactaaggttcaagctgcagtcattccggctcttttaagtaataaaagtgttgtggttcaagcagcaactggttcaggtaagactcatgcctacctgctcccacttttgaacatgattgatgaaaatgccccagtaacgcaagcagtagttaccgcgcctagccgagagttagcaaatcaattgtataaggtagcgcgtcaattaagggatgcgagtggtctaaatatttccattgaatatttgggcggtggtaatgatcgtaatcgtcaaattgaaaaagctgaaaatagagctccacaattaattattgctacaccaggtcgtttacatgactttgcctcaaagaaagtcattaatttagataacgtcaaagccttcattattgatgaagcagacatgacgcttgatatgggctttttaagtcaaatggatgagatcatctctaaactagataaaaaggtcgttttaggcgctttttcagctactatcccagttaagctagagaactttctcagaaagtatatgtcaaagccagactttattgttattgataatccagcaattattgctcctacaattcaaaatgacttaattgatgttggttcaagagataaaaaagaaattttatataagctcttaacgatgggacaaccatatttggccttagtttttgctaatactaaaaagactgtcgacgaattaactaattatcttgaagaacaagggcttaaggtggctaagatccacggcgggattactgaacgtgagcgcaagcgtattattcgccaagttagagaagggcagtaccaatatgttgtagctagtgatttagccgctagaggaattgacgtaccaggagttagcttagtagttaactatgaaattcctaaggatcttgaatttgtcattcaccgaattgggagaactggtcgaaatgggcttgaaggtcatgcaattaccttgatctatgatgaagagatgcctcaaattgaagacttagaaaagctaggtattcactttgactttaaagaaattaaaaatggtgaattagttgaaagaacacactaccatcgtcgtgataatcgccaagctcggagtcataagcttgataatcgcatgattggaatggttaagaagactaagaaaaaagtaaagcctggttataagaagaaaattaagcaagctattcaaaaagatcgccagcaaaagcgtaagatcgaagagcgtcatcagattagaaaagctaaacgtagacgtaagcgtgaacgcgaacaagcacgcggtaattttgacaactagaaaatttgtagtaaaataaatcacgtttaggacatattactgaagtattttcttcaaagagagggccaggcaggtgagaaggtctagaaatacttagtaatgctacctaatttaactaaagaatcaaatatttaaagaggtaacaaacactgttgcaatcaaggtggtaccgcgctgggagcgtccttgttttatgcaatagtgtttttttatttgtaggagactttttatgaaacaattgactagttcacaagtacgtcaaatgttcttggacttttttaaagagcatggccacatggttatgccaagtgcatcattaattccacaagatgatccaaccttattgtggattaactctggtgttgctacgatgaagaaatattttgatggttctgttgtgcctaagaatcaccgaattacttcttctcaaaaatcaattagaactaatgatattgagaatgttggtaaaactgcacgtcaccaaactttctttgaaatgcttggtaacttctcagttggggactactttaagaaagaagttatcccttgggcatgggaatttttaactagtccaaaatggttaggcttagatccagataagctttatgtaactgtttaccctaaggatacagaagcatatcatatgtggcatgatgttgttggcttaccggaagatcacattgtgaagttagaagacaacttctgggatattggtgaaggtccatgtggtcctgactcagaaattttctatgatcgtggtcaagaaaataacgatgttgcggaagacgatcctgaaaacttcccaggtggggaaaatgctcgctaccttgaaatttggaacatcgtcttttcacaattcaatcacttaccaaatggtaaatatgttgatcaaccacataaaaacattgataccggtatgggattagagcgtgttgtttcaattattcaagatgcaccaactaactttgaaactgacttatttatgccaattattaaagaaactgaaaagctaagtgatggcaagaagtatgcagcaaacaaggaagatgacgtagcatttaagattattgctgaccacgttcgtgctgtaagttttgcgattgctgatggggctcttccttcaaactcaggtcgtggatatgttttacgtcgtttaattagacgtgctgacttgaatggtcaacgtttgggtattaagggcgcatttttgtacaaattagtacctgtagttggcgaaattatgaagagtcactacccagaagttgttgatcaacaagcattcattcaaaaagtaattaagaatgaagaagaaagattccaagtaacgctttcatctggtttgaacttgcttgataatattattgctgaagctaagaagagcgatgataagactgtttctggtaaagatgcgtttaagttatttgatacttatggcttcccatacgaattaacttttgaagctgctcaagatgcaggtcttaaggttgataagaagggctttgatgaagaaatgaaagcccaaaaggaacgcgcacgtaaggctcgtggtaacttacaatcaatgggttcacaagatgttactttgatgaatatcaaagacaagagtgaatttgagtacggtactttagaagaaaagcatgctaagttaatcgatattgttgttaatgataagttagttgataaagctgacggtgaacacgcaactttaatttttgataagactccattttatgcagaacgtggtggacaagttgccgatcacggtgaaattttgaatcaaaatggtgaattggttgctcgtgtaacagatgtacaacatgcaccaaacgatcaaaacctacactttgttgatattattttgccacttgaaaagggacaagaatatatcttgaaagttgatcaaaaacgtcgtcgcggcttaaagcacaaccatactgctactcacttattgcatgctgctttacgtgaagttttgggtactcacactcaccaagctggatctttagttgaaccagattacttacgttttgactttactagcttagagccaatgactaagaaggaaattgctaacgttgaaaagatcgttaacgaaaagatttgggaagaaattccagttaagacaacagttactgatccagatactggtttgaagatgggtgctttagccttatttggtgaaaaatatggtgacacagttcgtgttgttcaaattgatgacttctcaactgaattctgtggtggtacccactgtgaaaacactgaccaaatcggaatgcttaagattgtttctgaatctgctgttggtgctggtactcgtagaattattgctgttactggtccagaagcttacaaatatgtaacagaccgtgacgaaattttgaaagaagttcaagatgaagttaaggcaactaaggctgaagatgtaactaacaagatttcttctcttgaagaagacttacgtgcaagtcaaaaagaagctgaacaattaaaggcacaaattaacaaggctaaagccggcgacttgtttaatgatgttaagcaagttaaaggtttaactgtaattgctgctcaagctgatgtagaaggcatgaatgatttacgtgaacttgctgataactggaagagcagtgataaatctgatgtgttagttttagctgctgaagttaatggcaaagccaacatggttattagtttgaacgataaggcaattaaagcgggtcttaaagccggcgacttaattaagactgctgctccaatctttggtggtggcggtggcggtcgtccaaatatggcacaagctggtggtaagaacccagcaggcttaaaggacgctattgctaaagtgttacaagaagttgaagaaaaacaaaattaattgagttcgttcgatatttcaagtaaaattaagaagataggaggaattttattatgagttcgctagataaaacgatgcattttgactttaaccaaaataagggtaagaatgtatacgatactctacaagacgtatacaatgcacttgaggaaaagggctacagcccaattaatcaaattgttggttacttactctcaggcgaccctgcatatattcctcggcataatgatgcccgtaatttaatcttgaaacatgaacgtgatgaaattattgaggaattggttaagagttatttaggtaaaaataaataatgcgattacttggactagacgttggctctaagactgtgggggttgcaattagcgatcctttgggaatcactgctcaagagcttgaaacaatcaaaattgacgagagcaagtttagttttggcatgcgccaaatcagaaagcttgtccgtaaatacgacgtcgaaggttttgttttagggctacccaaaaacatggatggcagtagtggacattctgtagaaagaagcaagcagtacggtgaacgcttgaaagagaagtttgacttgcctgttcattatatggatgagcggcttacaaccgtacaggctgatcgtattctggttcaagaagccggcgtacatgatcgtgttgaaagaaaaaaagttattgaccaaatggctgctgttttgattttacaaagttatctagaagcaaccagaaaggataagtaaaatgagtgaaaaaattaacgctaaccaagataatgatcgtcaaatcactttagttgatgatcaaggcaatgaagaactttttgaaatattgttcacttttacgtctgaagattatggtaaatcttatgttttactatatccagcagccgttagcgacgatgatgatgtcgaagtacaagcttttagctatgatgcagatgaagacggtgatgtaaccagttctgacttacacgaaatctctgatgatgacgagtggaacatggtacaaggcgttttaaatacatttttgtcagacgatcgcttaagtggcgaataatcttcaaaaaagactggcgcagaaaggctagtcttttttgcttaataaggatgaacaatgatttctattctcattttattaatttttatttattgttgttatgtaggttatcgacgtggcatagtgtatgaaggcttagctgcaggtggatatgtagtagggttaatcttggcaacattattatataaaccttttagtaacttcttaaatctttgggtgccatatccctcagcaagtgatcgaagtagctttgctttctttgataagactacaggattaacattagataagtcattttatgcagcaatagctttttcaattgttttggtgcttgtttgctgtatatggcgtttggtgatgttaggttttaatcagttaagatatgttactgtagatgctagattaaatacatggggcagcattattattgcttttattgtgacccaaattagtgtttatttgcttttatttatcttagctacgattcctaacaatagtttgcaaaatatgctggggcattctattttagcaagtggtatcttgcatttctctccaggaatttcgcaaattttcataaaattattcattacaacaatataaaagtgggcccagctacggggccctttttgctaggtggaagatatgaactctaaaattattgaaaaattagaatataatcgcataattagacaattaagtgacttggcaattactgcacctgcaaaagctcaggctctgaaattaatgccaagtagtgactttgatgaagtaaaaaaatcaattgatcaaactagagtactttcgaatatcttgcgagttaaggggccaatgccgataactgactttaaagatgttcgacctagtttgaagcgattgaaagttaaggctaacttaaatggtgaagaattaggtaatatatttctagttcttagtttggctaaagatgtaggacaatttgcatcggaccttgaagagcgtgaaattgatacacgtcctattgaaaagtacctcaaaaatttagcagttccagaagatttgtttaagaagttaaatcaagcaattgaatatgatggaacagttaaagatacagcttcttctaaattgatgcagcttagacatgatattcagagtaatgaaactgatattaagaaccacatgaatgactatattagtggcaagcatacgcaatatttgtcagaaaatattgtgactatcagagatggacgttatgttttgccagtaaaacaagaatataaaaataaatttggtggagttgttcatgatcaaagtgctagtggtcaaactttatttgttgagccacaagcagtcttggtacttaataaccgtcaacaaaatttgctggctcaagaacgccaagaaattcaccgtattttaatcgagttatccgaacttgctggtgcttatcaaaaagaaattaataataatgcattagcattaactcaattagactttttaagtgctaaaagcaaattagctaagaagatgaaagcgacagagcctgtcttaaatcaagatcatatcattaagttgagaaaggcacgccaccccttaattgatcctaaaaaggtagtaccaaataatattgaattaggaactacttttgatactatgctaattacaggaccaaacactggtggtaaaactattaccttaaaaactttaggattgctacaattaatggctcaagctggtttatttatcacagctgaagaaggtagtcaattaacggtctttaatgaaatctatgctgatattggagatgaacaatccattgagcaatctttgagtacattttcatcgcatatggatcagattattaaaattatgaataatgttactgaagatgatttagttttaattgatgaacttggtgctggaactgatccagaagaaggtgcaagtttagcaattgcaatcttagatgatttacgccaaacacaagcaaagattgcgattactacacactatccagaattaaagttatatggttataaccgcaagcgaactactaatgcctcaatggaatttgacttaaagaaattggcaccaacttatcgcttgagaattggaattcctggtcaaagtaatgcttttgcgattgcacatcaattaggaatgaatgaagctgttgtagataaggctagggacctaatgaatgatgaagacagcgacattaataaaatgattgagcgtttaacagaacaaactaaggcagctgaacaacttcatgaaactttgaagcaaaatgttgatcaaagtatcacccttaaacgtcaactgcaaaatgggcttgattggtataaccaacaagtacaaaagcaactcgagaagtctcaggagaaagctgatgaaatgcttgctaagaaacgtaagcaagctgaaaagattatcaatgatcttgaagagcaaagaagagctggcggacaagttagaaccaataaagtaattgaagctaaaggcgctttgaataaacttgagcgtgaaaatcaaaacttggctaataataaggtgctacagcgtgaaaaaaagcgtcatgatgtaagtgtaggcgacaatgttaaagtcctgtcatatggtcaacaaggtgtaattacgaagaagttaggcgagcatgaatttgaagtccaaattggtattttgaaggtgaaggtaactgatcgtgatgttgaaaagatcgctgcacaagccagtcaaaaaaagccagagaaatctgttcgctctagtcgtgcaagtagtgaacttgatttaagagggcagcgttatgaagaagctttgactaacttagatcgctatcttgatgcttcacttttggctgggttgaatacagtaaccatcattcatggtattggtacaggcgcaattagaaatggtgttcaacaatatttaaagcgtaatcgacatgtaaagagttataattatgctccagctaatcaaggtggaacaggggctacaatagttaatttgcaataagcaatatacttgcaaaaagtaagtaattatactaaactatacttataatttaaagaatttattttgtgaggtaataactatggttgatgaaattacagatgcaacttttgaagatgaaactagcgaaggtgttgttttaactgatttctgggcaacttggtgtggtccatgtaaaatgcaatcaccagtaattgaccaactttcagaagaaatggacgatataaagttcactaagatggatgttgaccaaaatcaagaaacagctcgaaacttaggaattatggcaattccaactttactgattaaaaaagatggtaaaattgttgaccgcttaactggttatactcctaaggaaaagcttgaacaaatcttagatcaatacactgattaatttatagtcaaaaagggtaaaccgcgattgcgatttaccctttttgatattagtctttttgtattcattaagttgatcaatcagactgagctgtaatttggacgacatgctttttagtaatcgtagctgaggcctcagtaggagtgccattttggcgttctaaacattctgcaataattccactttccaatgaaaattcatcactttggctatctagtcgatcagtaacaacttgtcctgaaagttcgaaaactgcagtgtgtttacgatccttgagtacttttaaagttccaaattgagccatgtcaaaaaattcgatcaagtcatcgatgtctgataagtcatatttgcgactgacgtgtttaccggcccagtaaagaatttctttatcttcgctacctaagatagtaggtaagataaagtcacggtataatgaatttaaaaaataaagatgttcgtttgtgtgttccatgctttcatttccttttgtcttctataacattttaacttaaaataggtggaggagaaaagagattttaatcatcatttgtttaaaggagtttttttaatggataatcgaccaattggagttttagattcaggcttaggtggcttaactgttttaaaaaaagtaattgagaagatgcctaacgaatcaactatttttattggtgaccaggctaatatgccctatggagatcgctcaaaagaagagattatttctttaactcgcgacagtgtaaacttcttattaagtaaagatgtaaagattattatttttggttgcaatactgccactgcggttgcaatgtctactattaaaaaagaaattcctttgcaaataattggagtagttcaatctggtgccttagctgcagctagaaccacagaaacaaagaatgttgcggtaattggtactaaggcaactgttaatagtcattcttatttaaaagaaattcaatatcgtgatccaaaaattcaagtaagcgaatttgcacaacctaaattagcgcctcttgctgaggaggatcctgctgaagagattaagcaggctgtggtcagcgaaagcttagcgccgttgaaaaaggctgattacgatacccttgttttaggatgcacccattatccattattaagaaaggaaattgttgcagtggttggtcaagatagaaagattgttgacccagctgatcaggtggcacaatatacctataatgttttacgacgtgatggtttatttgcggctggtaattctgatacaaaacacgagtactatacgacaggtgaagctaagaagtttactgaaataacacgtcaatggatgaatgatgaaacaattgttggtcatcatgtagatgctgaggattaaaaatggatactttattatttgcaactaacaataaaaacaaggctaaggaagttgaagaagccttaaaaaagaataactttccgattcatgtgattactaatcaagatttgactgacccaccacatgtgttagaaactggtaccacatttttagctaatgccaagctcaaggctcaccagatggcagaatttagcaatctaccgactttagctgatgattcaggattatcggtcgataaattaaatggtgctcctggcgtttattctgcgcggtatggcggggaagctcataatgatgctctgaacaatgctaaattattagcagaattaggcggggtgccaaaagaagcgagaaaggctacttttcatacaacgatggttgtttcttggccaggtaaatttgaggatgatctagtaactgaaggcgaaattcgtggtgaaattttaacttatccacaaggtgaaggcaattttggttatgatccgcttttctttgtttctgataaaggaaaaacatttgctgaaatgacggtggatgaaaagaatgcaatttctcaccgaggtcaagctttgagaaaattacttgcggaactaccggcctggtggaaaaagatggaaaacaaataaatttcgaagaacttattctgattaggggataagttctttttgttttttctgcttttaattataagtatgaaagcgctatactaaaattgtgagtttacttaataaatgtaagtttaattgaaattgaggttatagcgtatgaaaaaagttttagcaattaattcaggaagctcgtcctttaaatataaattattttcttttcctgatgaaaaagttatcgcttcagggatggctgatcgagttgggatggaaaatgctgtctttaaaattaagttgagtaatgggcgagaatatatcaaaaatatgccgattcatgatcaagaagaggcagtgaagcttttaattgaggatttgaaaaaatttcatgtagttgaagatctgagagaaattactggaattggtcaccgaattgtaaatggcggtgaaatatttaaagaatcagttcgtgttggtgacaaagagttacaagaaatatttgatttaggtgaacttgcgcctttgcacaacattcctgaggcaaatggaattaaggcctttatgaatattgttcctaatgttccacaagtagcagtttttgatacttcatatcatcaaactttagatccaattcactatctatattcaattccttatgaatattatgaagattatggaattagaaaatatggtgcgcatggaatttctatttcttatgttgcaccgcgtgcagccaagatgcttaagaaaaatcctaacttagttaacttgattgtttgtcacttaggatcaggtgcttcagtcactgcggttaaacgcggaaagtcttatgatacttcaatgggaattagtccgttaactggtgtaacaatggggacgagaagcggagattttgatccttcagcacttcagcgtttaatgcataagaccggaatgaatattgatgaagcaattgatgttttgaattataagtcaggtttattaggtatttcaggtgtatcttctgatatgcgtgacttaattgaaagtaaagataagcgtgccaagttagcacgtaagatattcattaaccgtgttgttcgctatgttggtgcttatgcagcagagttaggtagaattgatgcagttgtctttactgcaggagtaggtgaacatgatcctggtattagagctggtattatgtcctcattaagatatttggggttagaaccagattttaaggctaatcgaacagatggtgaaaagtttatttctaaacctaagtctagagtaaaggcaattattgtcccaactaatgaagaattaatgattgctcgcgaagtagttcgcgttgtgcaataaaaaaggattaagcaatagataaaagtctggttgcttaatcctttaagatgcagagctattttcttgttttgttggcatgggactgaatttaagcccgcgttgattgaattctttgatataagcactgagataggcatttttaatcgtactttggctatttgcaattacttgaaaatgaatttgataggtaatacttgagccggtttgattaatgattccaataatttgagggccctttttgatttgttttttaaacttatcttttaaagcggcgtttaccgtatcaacggcatgattaatttcagtaagattattttctactgaaagatttaaattaatatccatgctccagccagagtgtgaaccatgactcaaattttcaactacggtaatgttgcgattaggaatatagattacagcgccattagtagttttaaggcgggtattgcgcaaggtaaaggagagaacagttccggtgtagttgccaattttgacagtatcgccgatattgtattcaccttcgcttaagatgttcatcccagttatgacatcgctaactaagccttgtgcgcccatccctaaagctagagatactaatcctacactagctaatagcgttccgactggaattcccattaacgttaaaatactatataaataaaataagagaatagtatattgaaaaagagcaattcctagttgagctaaggttctttttcttccagtcatgcgttcctgaaatttaggattttttaataggtattttgttaataagcgctttcctatatgccaaattaaaaagaaaataattgtagtaataataatttggatgccacggcttaacaaagtgtgcagtacattgtcccagttaattaggtaatcgatattattagtttttttagttgtagaagttccttttagaagagtagaccagttcaactcatgccctccttatctagtttctttaaaaatagtatatcaaaaacttgggtactatttcattgcttgaggggaggaataatgctagacttttttatgagaggaataattaatggaggatagattatgtcaatttcatatggtgcattagctggcttaattgcagcagttgcctttttaatcttggtcttatttactttacctttgattgttagagttactaagacaatgaaaaaagttgactcaactatggacagcgttaatacggctgttgatgatttaacgaaacaaacttctgtattaatgaagcaaagtgaagatttattagaaaaaagtaatgctcttttagctgacgtaaatggaaaagtaacagaattagaaccagttgtaaaggcagcagcagatttaggtgaaagcgtgtcagatatcaattcttcatcaagaagaatggttgaacgcttctctggtatgggtattagaggagctggaattggcatcttttcatctctagttagtcgcatgtttgcaagacgtaaacgtcgtcgcggtgaagactaatatttattaaaggagaacaattatgcgtaaacttggtggatttttattaggtagcgttgttggtttaggtgttggcttaattgctggctcattattgttgccagaagacgcaactgacgatgtaaagaaaaaacttgctgaaaatgaaaaattgcaagatttgaaagaaaagtatgataaaggaactgaagctattaagaatcaattagcttctttccctaagtcagttgaagatgattccgaattaagagattttgatgatatcgtaattgatgacactaacaaagatcttggcgaagatgaaaaatctgacaaggatgctgttagcgatttaaacaatgctgaagatactgaaaataactaaaattaaatatttataaagagaatcaagttctacttggttctttttttgcaataaaaaacctgttgataaaatttatcaacaggtaattttaggcctagtctttaactggaatatattttaattccttgcttgtcttagtgaaggtttcaaaaccgtttttagtgactacaccacaatcttcaattctaactccagctacgttagggatataaataccaggttcaattgagaagcacatgccttcctcgagaactacgtcgtttccttccatgatttgtggaaattcgtgaacgttcattccaataccgtggccaagacgatgaatgaagtattcaccataaccagccttagtgataatatttctagcaacagcatctaattcgctagcagtaatgcctggtttagctgcttcaatagctgcttgttgcgcctcacggtcgacttcataaatttctttttctttagcagttggttcgccgtaagcgacagttctacttgagtcagaagcatagccgttgtgcatggttccaagatcgaataaaactaattcgtttggttcaattttgttcattgttggaccaaggtgagggttagcagcatttgtaccagcttggacaattgtctcaaaactagtgtgcattacacctttttgaagctttagttggtaatcaatttgtccagcaacataacgctcagttacgccgtttcttagggcattaaaaccaatttgaaaggcaaaatcagcttctgcaccagcagcctttaattgttccacctcttctggagttttacgtaaacgtgcttcagctacgaatggagaaacattattggtaaatgaagaatcaggaaaggcaatgcgtaattgttctaaacggtcaactgaaagatgcgatttttcgattgcaatattatttggtttaccaacacgttgatttactaaatcagcaatttttgcccatgggttttcatggtcaagatagccataaacatcgccatcccaagcagagtttttagcttcttcaacatttaattcaggtgcaaaaataaatgcaggcttgtctttaaaagcaattaaagcaaaaattctctcatgtggatccatgctatagccggtgaaataattaatactgattggatcagaaatataagcaacatcattattggttgaaattaaccaattttgtaacttgtctaagttcataattttggctccttttttaatatatactgggagtataccatataatatggtaaaataatgagtttttagtcgtaaacggttgcaatgtgtgaatattcttgataagttataaaagagtgtttttacaggagtgtgagaaatttatgcaaaagcaagaagtaacaatttatgatgttgctcgtgaagcaaaagtttctatggctactgtttcaagagtagtaaatggaaataataatgtacgtaaagaaacacgtgaaaaagtattagctgtcattgatcgtttgcattatcaacctaatgcagttgctcaaggattagcttcaaagagaactacaacagttggattgattgtccctgatttgacaaatatgcactttgctgaattatctaagggaattgacgatattgctacaatgtataagtacaatatcttactttcaagtgtcggaaataccttgttaaatgaagatcaagttatccaaaatttacttaataagcaagttgatggtgtaatttacatgtcaaacttgatgaatgaaaaggcacaagaaattttcaatcgcactaacacaccagttgttttagctggtactgctgatgctaaccaagaattttctagtgtaactattgactataaggctgttgaaaaggaagctttaggtcttctattaaaaaatggtaagaagaacttggccttagtcgtaggtgacggaaaagcttatgttaacaaggacaaccgtttcgttgcctataaggatttcatggaagaacataatttaaagaacgttcacatctatgaagatgccaagacttatgaagatggctatgaattatttaagcaaatcaaagctgataatgtagatggaattattgctactcgtgatgtaacagctgcaggtatcgttaatgctgctgatgatgctggtgtaaagatcccagaagatttagaaattatctccgctgcttcaactaatgtcgctaaaattgttcgtcctcaattaacaactgttcaacaaccgctttatgatattggtgctgttgcaatgagaatgttaactaagttgatgaatgatgaagaattagacgattcacatgttatcttgccatatactttgaagaagtctcgttctactaagtagatctaactatagaaaatccctttaggtaatttacctaaagggattttttaatatataattttaatttttctacggagcagtcggaccactatcagtggctgtattgccttcactagtttcgctgccagtatttgtattagcagctgaaccttcattagaactaatatttgaatttacatcatttgcggcattgttgctctcggaattactattttcagttgaagaagatgattcacttgtggaacttgcacgactccgtctggtagaagtagatgaagaagaaccattaccatttccgccttgaccagtacttcgagcttgctgatcattagctccgacagtccgattagtcgaagatgaggaattattatttgattcacgatatacttcgtggtttttaccatagtaatttttagcatcttctgaagttgagccatcagctacagcaaacagactgttgatatttttcttcttagaaattgtcttaccagtgtagattaagactttaccataatcattattcttgccttctaagtagtcgtagaagaggttgtagtctttagttgatccaccgataccaaatcttgcagtagcagctggagcaggggataaacttaatgcggtagtctttttaccagaaagttcaatattatcgccatcatagcttacagttcctggcaatgttccagttcttgctaagactttatttttataaacagagcttggacgacttggtgcatcatttaacttaaagattgacggatcttcttcgtaaagtgcattggcgatatttgcccaaaggtttaagttggtttcactggaattagaatctaggttatatgagtgaccatagaagttgtcataccccatccaactagaaattgtgattccaggagtagacccattgaaccaaatatcacgataatcattactggttccagttttaccgattaagttcttgtagttaaacttcaaagtaccagttaagcttgaagcagtacccttagttactacttggtgaagcatcttttgcatgatgtaagaggtgccggtagagaagactttttgtggattttgtttatgcttataaattactctacctgatggatcttgaatttcttcaatgtagtaaggatcagctcgcttaccattgttatagaagttagagaaggcactagcgttatcagcaactgaaaaaccataatctgtaccaccgagggccaaacctaggttttcaaattcgcttttactcaagtttaagcctagttttttcatatcctgacgtaaattaatgttcttatcgttgactaatttattgtataagtttacagcaggtaagttataagatttacttagagcttcttgagctaagataaaccggttttcaacagtggaattgtagtcagttggaatatagttgccaaatctagtagggaagtctgctaatgctgtttgactagaaataaacctgtgttcaattgctggaccataaactagatatggcttaatagatgaaccaggtgaacgataagtatcaaaggcgtgattaatttgagagttcttaaagtcaactccgccgctaaaagctaataccttgccagttgcattatcaattacaacactaccgttttccacatgctcggtagtattaacccacttgttagtagatgaatcaaaatcacgagaagtcttatcttgaccatatttattttgcttaactatgcgttgcatagtttgataaagtggctgtctaatcgtggtcttaatatgatagcccttttgatgaagcagttcagttgcactagttaagtattgattataacgattagtatcttgtttaacatctgatacctttaaaccatcttgctcaattaatttttctgctaaaagactagtactcttattcattactaaattatataagtagccactttgtttcttttgtttagatgctttttcaggagcaaggaagtcagcacgtaaatcatattttttagctgcaagatagccttttttactgatatcgccgtttcgatacatccgaaatagaacaatatcttttctacgcatcgctaaatcaaggtcttttttaatttttccgtttaaacgatatggggtataaacagatggactttgaggtaaaccagcaataaaggcagcttgaggaaggttaagttcagaaatagacttaccaaatatcccttgagctgcagttttaatacctacgatgttttctccacggttgtttttaccataaggagcagcatttagatatgaacggagaatatcttcttttgagaaatgcttttcaatcttatgagcataaaacatttcggtaacttttcttctccaagtggtctgactagttaaaaactgcattttaactaattgctgagttaaagtcgatccaccagtttgtacaccaacaccagttagctcagaaagaacagctctaactagggatttaggtaaaacccctttatgaatatagaaattttcatcttcagtagctgtcacagcattcttaactaaaggagttagttcgctttcacttgcctttttagtgacggtatctggacgaactgtagcaatttttttattgccagcatagtaaagtgtggctgaattttgtgcatggtttatttgctgatttaattcgctaattgttggaatgggctgctggcgaacgatgccaagagcataaccaccaccaaaaccgattaggagaaacaaaccaaaaactgcaattaagatcaaataatgaaaaacacgacgtaaagttaaataaacgatgccactgtaaaatttccattggctttcgtctgatttgctttgaagtgttttaacttctggccccgcagttaggaactctatgattttttcttttaaatttttcacagatcaggatcctttgttagttactttccccctattatagcaaaaaaaggactagcaatgacgctgtccttttttacgaatttattaatattttgatttatttagttaattcatagattgcttcggcataaatagcaattgaattaattaaatcgtcaaccttcatgtattcatttggttggtgcataacaagtggagcaccttctggttgagcaccaaaggctacaccatgtttgaataaacggccatatgttccgccaccaatgataacttcgtgacctttcttaccagtttgcttttcataaactgaaagcagggtcttaacaattggatcgtctccaggaacgtaatgaggagcttctgctgaaccatcaattctggcgtctaagatatcgccgaatttttcgttaatatttttaaccatttcttctggctcaataccttgtgggtagcgaacattgtttaataggtatgcgttttgaccttcaaagttaaacatacttggtgaactagttaggtcgcccattaagtcgtcatgatggaaaatacctaatttcttaccgttaaagtctttgtgttcaacagttgcaaggaagtgtaagaaattcttcgcttgaccgtcaaagttaaggctatcaaggaagagagcaaggtaagtagcagcatttctaccagtttcaggagcagaagcatgagcaccatgaccggttaaagttaatgaaagacggccgctaagcatttctgcctttccttcaagcttatgctctttcaggaataagttgaacttttctttgatgccatcgatatcgccttcaagttgagcatgagctgtttgagggataacattagttgcaattcctgattggaatgtccaaagtttaacatcgccttggcttgggtcatctttaaagtcaagttttaaggtaacaatgccttgttcaccattgataattggaaattctgcgtcaggagagaaagcaacatctggagctggttgatgctttaagtaatagtcaattccaacccagttagtttcttcattagttccaactacgaagtcaattttctttttaggtttaaagccatgctcttttaaaatcagcatgccatagtaagctgctaaggatgggcctttatcatcagcactaccacgcccataaattttgccatctttaatagtcatcttaaatggatcagttttccagccttcgccagcaggaacgacatccatgtggccgataataccaacgcgtttgtcgccagaacccatgttgattcgaccagcatagttatcaaagttttcagtatcaaagccgtcacgtttagcaaatgataaaaacttcttcatagccttcactgggccaggacctacaggatattctttgctagtattgtttaaatcttcagaagaatcaattgcaatcaattcttttaaatcatttaaaatagcatctttcttttcttgtgctaattttttataatttagttcttccataacgtactcctttaatttttatctctgattaaatattacagcatttacatctgaataagtcgaccaaaagcttttatttgggactttttcaactggtaaataaggaaatagggcaacgtttgtttgacgaaaagcaggatcgagttttcgataattcttataggcaaatgtgtttttattaaataagccataatataagactttagacgacttaacccagccatcatcagtaagaagccataaatctttaactccgccacttacacctagtattttatagtgttttcttggcataagttgattctttttaccagattgcttatcaggtttattataagtgaaaattggattttgagtagggttaataatacttaaattccaatatggtaaaatccattcaggttgtaggtccaaactaacaaggtcagcgggaacaaattccttatcgccaatttggtaaaaagtctgtcctgaagcaataacagctgaagaaacatgaactgggtctaaaaaattaagttcttttgatgttgtcacctttagatatggattctcactaattgtagtaggtacacggccaaagtaaattccgtccttgttaacgacatattttttagtgccagttttagctaatttgtatttatagcctcttgcggggaaattagtgacaactccatcaacatcattgttgattaaccaattccataacttaggcgactcattcatttcggcccaaacaaataccttttgatgtagcgcgtgaagttgactaattagcttgggattttgggtaactagatcagatgagatattgattccgtttacgtaacttagtacttcaaaattaattctttgcaaagaaccaacaataaagattcttggaacatctggtaacagttgactcatagtttttaaacttggtgcagaaaagctgtgaatcattactcgatcttgcatatggtatttcttgatactggcagcaaggagttcttccatatttttaggactattatgcttagttttttttgtttcaagcaaaaatttagtgttaggtttatctttgtagtaatcaaataattgatctaaagaaataattgattcaccattagcttgttttaaggtgtttaaataggaaaaattattttgtgatacaataaccgatgatccaacaactctgcttagatcgcggtcatgagaaacaactaagacgttatctttggaaacatgcaggtcgagctctacatagtccgcgccatctgcaaaagctgagttatcactttgaattgtttcttctggatatttactgggattaccgcggtgaccaatgactaggaatcccgattcaaaaataaaaatcaaactaaaaaaaagggctaggaaataaagcctgcttgttttcatgtgtacacctctattctttttaacaatagcatggatgtatacttttttctataattaatatagtagttaataatcatttttaagaaagtagatgctgcaatatggcttatgagcaactagatttaatcgaagaagttactcgcaatgatggatctaaatattatgaaatttcaaatattgatcaaaatggtatcgctgaattagccgtagatcgtggattgataaagaaggtgcggatacttcagctaaatttggctagaacaaaagcacttcaattatatgaagaatatattaataaaacgtaccaactagagactttaaccaatgaggatgattggaaagatccgcagtgggttgagtgggaaaagcctaaaggaaaagttttagacgcctttaatacagtattaaaagccaatcatattggttagaagagagtaaagtatggaaaaattacgtattgttcataccaatgacctacattctcactttgaacaatttcctaaaataaaaagatatttacatcaagcacaaaatgacaaaagtgttgatcaaacttttaccttcgatgctggagactttatggatcgttctcatcccttatctgatgcaactgagggccaagctaatattaagctgatgaatgaatttaactatgatgcgatcacaattggtaataatgaaggaatctctaattcacatgcagttttagaaaaattatttgatcatgcgaattttccagttattttagctaacttacgtgaagaagatgaaagtatgcctaaatggtgtacttcatataagatttttgaaactaagaagaaaacgagaattgcagttgttggcttaactgctgcatatcctatgacctatggtcctaaccactggcatgtgaagttgatttctgatactttagataagttacttcctacaattaacgggcaatatgatatgttaattatcgttagtcatattggcttaagaatggatcggtatattgcacatcattatccagaagtggatttgattgttggtgggcatagtcatgattatttaccaaagggcgagaaagtaaataaaacatggattacccaaactggaaaatggggtcagcatatcggcgatattgcgattcaattaaatgatgatcaccaggtagtgtcaattgtaccaaatactgtcaaaaccgctgatttaccaagttcggaatctgatcaagctaaaatcgatgcttggcgtaagcagggtgaacaaatgctgcaatcacgtcaaattgcaaagttacctgctaaatttaacgatgataaaatggcagcaattcaagtttctctagatgcaattagtgattttgctggaactgatattgcggttttaaatagtggcttatttttgacgccatttcatcagggaattttaacagaagctgatttacaagctgctttacctcacccaatgcatgtagtgcaaactaaattatttggaagtgatgtttggcgcatggtaatggagatggaaaagaaccgtcattttctaagcaagtttgccctcaaaggaatgagttttagagggaaaatttttggcgatcttgtttataaaggcattcaggttgatcatgcaagtagaacagtctacattaacggaaaagagattgatcctgaaaaagagtatacaattgccttgcttgatcattatgttttaattccatttttccctaccatttcaattatgggtaaaaacaagtttttattccctgattatttacgaactgtaattggaaactacttaaaagagaaatatccaatagataaatagaaagaaaaataatggagtataaagaagcagataaagaacaaccgctttatcatcctttggctcatgtaatcgttaatgaagataagataatgattaatgggcgaaagtatgaaattttagctaatgtaaaagatgctctagatattgaaatgctaaaagagaaatatgatcctttccttgaccagtacgattatttagtaggggacatttcaagtgagcatttaagattaaaaggattttacgatgaaaaagatcgcgttgcaattgataaaaaagctaatgcgattgtggattatttagaggaatattgtaatcctggcagtgcatattttgttttacgactagctcaagaaaatcagattaaaaaggttgcatttggcagacaaaataagagaaaaaatatgtctaataatcgctatcattctaaacgtccctactttaaagaaagacgtgtccacaaaacaagaattggtggccataagacagctgtaaaatttcaacgtggaaaaggaagtcacaagaataaaggcttcgtaattaagaaaagaaagggctaattgtggaacataaagattataaatgttacttaattgatttggatgggactatttatcgcggtagcgatacgatcgaaagtggcgttagattcattcatcgtttgcaagagaaaaatattccccacttatttttaactaataattctactcgtacgccgcgaatggtagttgataaattgcgcggacatggggttaacacagatatctatcatatttatacgccggttttagctacggagtcttacttgcttgctcaaaatccagatactgctaagataccagtttatatcattggacagacaggattagtgcaaggtctgttaaaaaatgaacgtttctactacgatgatcgaaatcctaaatatgttgtagttggaatggatacggatttaacttatcataaaattcgcgttgctactcgctcaattagaaatggcgcaacttttattggaacaaatgctgataaaaatttgccttctggggatgagctattgcctggtaacggtgcactatgtacaatgctagaagtagcaacaggtgttaagcccatttatattggtaaaccttcatcaattattgtggctagtgctttgaagatgctaaatgctcaaggcagggatgcaattttggttggggataactatgatactgatattatggcaggcattaactgtaatattgactctttgttaactttgaccggtgtaactactaagaagcaattggcagaaagagataagcagccaacttacgttgtagaaaatctggatgagtggaaactatgaagaagaaaccaatcgtcgccgttgtttacaattgtttgatggctcttgctactgctactttaggtgcagtagttttaagttggccattattagcagtttttgtaaaaattcaaaaaacgaatttgatcgtaaagacaaccttagcaacagtgatgaagaactatacacaactcttagattatttattgtcgccatttaatgatagacttcagatgtcaaatttcccgacttctccaagtgcagcgcgacatttttatgagtgtaagttactatttgaattagcgataattgtttttgtagttggattaattattcttattttcttaaaaatgagaaaaagaatgaattatatttatatttcgagaacaacagcgctaattttcatgattttgcctgtgattatcttaccgtttgctttaatgaattttgatgaattttttgtagcatttcatcatctattgttcaacaatggggattggctatttaaccctgcgacagacccaattattaatgtattaaccgaagagttttttgctggttgctttgcaactggcggaataatttatgagttatatttttcttgttttattttgtcaaaaaaataaaggagctttaacgaagctccttttttaatactaattttttctttaaccatataatcaagactggtaaaactgaaattaaaatgattgcaatcacgatcaatgagaaatgttcctggacgattggaatatttccaaagaagaatcctaatgcggaaaataaggttacccagagaaaaccaccaatgaagttataaatgatgaaagttcgataatgcatcttacttgcacctgatacaaatggaacgaatgtacgaataaatggaataaatcttccgattacaattgtaataccgccgtgtcgatcgaagaagttttcagcggcttttcgtttatcttgattaattaacttgttgaaccaactgtgtttagtcccttcagcttgtgaccaatgtccgatttcatagttaatcgtatcacctaaaacagcagctgctatgaagattaaatagcaaacccagaagtgaagattatatttgggcgttgctgccatagcacaacatgcaaatataagtgaatctccaggtagaaatggaaagataaccagacctgtttcgataaaaataattgcaaataagattaagtaagtccagtttccaaacatattcacaatggtgactaaatggtcatcaatatgaagaataaaatcgataagtcccataaataaaaatagattcctttcacaaattaaatactggtagaatgaaaagtcattgttttttctggaaataggtcttgcataatgttgctaattgcaatttgtgcctcgccaaatcctaaagcaatcattggcactcttccaggataagtaatagcatcgccaattgcatatacatgaggaaggttggtatgcattttttgagaaacagcgattagattatggtctaatttgatcccccatttacgtaattgtcgattatcgctcttgaagccatatgcaactaggatttcatcaacatttttagtaacaaaatcttgacttgcaccaactttatgcaaaactaattccattctattattgtttaactgcagatcttttggaagataaggagttaaaagttcaacattttttaaacttttaagcttattgacggagctttcaagaccgcgaaattcatttctccggtgaattaagaatacatctgatgtgtttgctaattctagtgcccagtcaagtgcagaatctccacctccaagaatggctacttttttgttagcaaagatttcaggatgctgcattgagtaatggatatgttggtttacgtctaaagtagttgataaaggaagagttttgggcttaaacgcgccaagtcccgtagcaattaataaactttttacttcatattttttgtcaactaggatattttcattttctaaaaaagaaatctcttttactttatgagaaagaatgaatttagtattgatgttttgctcaagtagctgagaaactagctttttacctttaatagaaggaaaagcgggaatatccttaatatttttttgtggataaagcatattaatttgaccgccaatttcgtctaatgcatcaaaagaaattgtctttagtccatgtaaattagcaaaagaggctgcaaaaagtccaataggacctgcaccaataatagctaaatcatatttttccatctttataagaaatcctccataaaaattaagcatagaagtcatgtctttagcgttaattaaaaagacagttataattaatattagtaagggatgagatagtatgcaagttaaaattggcgatatagttcatggaaaaattagtgggatacaacaatatgggatttttgtaaggctagatagcaaagtagaaggcttgatccatatctctgaaatacatggtggatatgttaaagatatcggaagagagtatcaagttggtgaaacaataaaggtacaagtaattgatatagatccatattctaatcagattagtttatctagaagggcagtccttcctgaagtaaaagaagcaagaaaaaagcgagtccatttttggacttcaaaacgagttaagaaaggttttactcctttaaaagaagtattgaatactcaaattaaagaagcaaaaagtagatattctaaataaagagtaaataaacgtgttaaggagtagtgcttaacatgtttatttttatatccgaattttcaaaatgaagagttcgtttaagttgtgaaaacaaaaggcaaaaatcagacaattaaaatctattaataattaatattcggaatatatttttttattaaaaactatattgacgaaagagagaaaagtctgtaaagtaatacatgctgtttgaggcaagcgcgaagcagaggcaggaagccaagcaaagagcttgtcaagggagcagaaagatgataatattataaagctgtcatttgagaaagatgaggggcaagaaaaataacttgtcaaagctcaagagacatgatataatataaaagttgtcacacggcaacggtagtaccttgaaaactgaacaaagtttcgctgaaagtgtgcgggatataaaaaatcccaaacaaaagcgaagtcaattcgtaagcaataaatttgagataactcaaagaaagttttagagctaaacgataaaaagctcattttcaagaaggaaaatgagagtttgatcctggctcaggacgaacgctggcggcgtgcctaatacatgcaagtcgagcgagcttgcctagatgaatttggtgcttgcaccagatgaaactagatacaagcgagcggcggacgggtgagtaacacgtgggtaacctgcccaagagactgggataacacctggaaacagatgctaataccggataacaacactagacgcatgtctagagtttaaaagatggttctgctatcactcttggatggacctgcggtgcattagctagttggtaaggcaacggcttaccaaggcaatgatgcatagccgagttgagagactgatcggccacattgggactgagacacggcccaaactcctacgggaggcagcagtagggaatcttccacaatggacgcaagtctgatggagcaacgccgcgtgagtgaagaagggtttcggctcgtaaagctctgttggtagtgaagaaagatagaggtagtaactggcctttatttgacggtaattacttagaaagtcacggctaactacgtgccagcagccgcggtaatacgtaggtggcaagcgttgtccggatttattgggcgtaaagcgagtgcaggcggttcaataagtctgatgtgaaagccttcggctcaaccggagaattgcatcagaaactgttgaacttgagtgcagaagaggagagtggaactccatgtgtagcggtggaatgcgtagatatatggaagaacaccagtggcgaaggcggctctctggtctgcaactgacgctgaggctcgaaagcatgggtagcgaacaggattagataccctggtagtccatgccgtaaacgatgagtgctaagtgttgggaggtttccgcctctcagtgctgcagctaacgcattaagcactccgcctggggagtacgaccgcaaggttgaaactcaaaggaattgacgggggcccgcacaagcggtggagcatgtggtttaattcgaagcaacgcgaagaaccttaccaggtcttgacatccagtgcaaacctaagagattaggagttcccttcggggacgctgagacaggtggtgcatggctgtcgtcagctcgtgtcgtgagatgttgggttaagtcccgcaacgagcgcaacccttgtcattagttgccatcattaagttgggcactctaatgagactgccggtgacaaaccggaggaaggtggggatgacgtcaagtcatcatgccccttatgacctgggctacacacgtgctacaatggacggtacaacgagaagcgaacctgcgaaggcaagcggatctctgaaagccgttctcagttcggactgtaggctgcaactcgcctacacgaagctggaatcgctagtaatcgcggatcagcacgccgcggtgaatacgttcccgggccttgtacacaccgcccgtcacaccatgagagtctgtaacacccaaagccggtgggataacctttataggagtcagccgtctaaggtaggacagatgattagggtgaagtcgtaacaaggtagccgtaggagaacctgcggctggatcacctcctttctaaggaaggcgaaagatgatggagagtgcgagagcactaaagagaagtcatcgagaaagccaagcggaagcacactgagaaactttgtttagttttgagggtattacctcaaacaacttgaataacaagccaagcacaatcgggcctatagctcagctggttagagcgcacgcctgataagcgtgaggtcgatggttcaagtccatttaggcccattcaaagtgaaagctttgataaaaggcaatgatgggggcttagctcagatgggagagcgcctgctttgcacgcaggaggtcatcggttcgatcccgttagcctccattgagaccttgtgtctcaagggttagtacattgaaaactgaatataatctaaagcaaaaaaccgagacaatcgaaaaaacagattgaagagcgaccgagaagagagagaaactcaacttgaaataggtcaagtagaaaagggcgcatggtgaatgcctaggcactagaagccgatgaaggacgtgacgaaccacgaaaggcttcggggagcagtaagtaagcgatgatccggagatatccgaatgggggaacccaataccgcgaggtattatcaagagctgttaaggctgttgaaggaagacgcagtgaactgaaacatctaagtagctgcaggaagagaaagaaaaatcgatttcccaagtagcggcgagcgaacaggaaagagcccaaaccagctggcttgccagttggggtagtaggactgcaataaagtacttgaagcgatagcagaattatctggaaagataagccagagagggtgagagccccgtaagcgaaattgcagagagacttagcaggatcctgagtaggtcgggacacgaggaatcccgattgaaaccgcgaggaccatctcgcaaggctaaatactaactagtgaccgatagtgaaccagtaccgtgagggaaaggtgaaaagaaccccggaaggggagtgaaagagaacctgaaaccgtgtgcctacaagtagtcaaagcacattaaagtgtaatggcgtgccttttgtagaatgaaccggcgagttacgttatggtgcaaggttaagtcagaaaagacggagccggagcgaaagcgagtctgaagagggcgagagagtatcatgacgtagacccgaaaccaagtgacctacccatgaccaggttgaaggcgtggtaaaacacgctggaggaccgaacccacgtgagttaaaaatcgcggggatgagttgtgggtagcggtgaaattccaaacgaacttggagatagctggttctctccgaaatagctttagggctagcctcgtgtgaatgataatggaggtagagcgctgtttggactaggggcccgtcaggggttactgaatccagataaactccgaatgccagatatcaatgcacgggagtcagactgcgagtgataagatccgtagtcgaaagggaaacagcccagatcaccagttaaggtccccaaatctatgctaagtggaaaaggatgtggagttgcgtagacaactaggatgttggcttagaagcagccaccatttaaagagtgcgtaatagctcactagtcgagtgacgctgcgccgaaaatgtaccggggctaagcatagtaccgaaactgtggatgcatatcaaaggatatgcgtggtaggagagcgttctaagagcggcgaagttagatcgagaggactaatggagcgcttagaagtgagaatgccggtatgagtagcgaaagataggtgagaatcctatccgccgaaagactaaggtttcctggggcaggctcgtccgcccagggtaagtcgggacctaaggtaaggccgagaggcgtagccgatggacaacaggtagagattcctgtactgaaattgttcgataagagcaaaggagggacgcaggaggctaatgacgcatgtagctggaaaaacatgtgcaagcagtaagaaaaaagatgagtcaaatgcttatttttagatttcaagctgtgacgcggagtgaaatcaaagtagcgaaggtcatgatgtcacactgccaagaaaagcttctagccagagcaattttacccgtaccgcaaaccgacacaggtagtcgagtggagaacactcaggtgagcgagagaactctcgttaaggaactcggcaaaatgaccccgtaacttcgggagaaggggtgctgatggtaaaagatcagccgcagtgaataggcccaaacaactgtttatcaaaaacacaggtatctgcaaaatcgtaagatgacgtataggtgctgacacctgcccggtgctggaaggttaagaggagagcttagcgcaagcgaaggtttgaattgaagccccagtaaacggcggccgtaactataacggtcctaaggtagcgaaattccttgtcgggtaagttccgacctgcacgaaaggtgtaatgatttgggcactgtctcaacgagagactcggtgaaattataatacccgtgaagatgcgggttacccgcgacaggacggaaagaccccatggagctttactgtagcttgatattgagtatttgttaaacatgtacaggataggtaggagccagagaaagtaggacgctagtcttactggaggcaatgttgggatactactcttgtttgatggatcctctaactcgcagagctgagcgttctggaggacagtgtcaggtgggcagtttgactggggcggtcgcctcctaaaatgtaacggaggcgcccaaaggttccctcagaatggttggaaatcattcgcagagtgtaaaggtataagggagcttgactgcgagaggtacacctcgagcagggacgaaagtcgggcttagtgatctggtggtactgcatggaaaggccatcactcaacggataaaagctaccctggggataacaggcttatctcccccaagagttcacatcgacggggaggtttggcacctcgatgtcggctcgtcgcatcctggggctgaagtcggtcccaagggttgggctgttcgcccattaaagcggcacgcgagctgggttcagaacgtcgtgagacagttcggtccctatccgtcgtgggcgtaggaaatttgagaggagctgtccttagtacgagaggaccgggatggacataccgctggtgtaccagttgtcttgccaaaagcatcgctgggtagctatgtatggaagggataagcgctgaaagcatctaagtgcgaagcccccctcaagatgagatttccgatgcgtaagcagtaagacaccttaaagacgatgaggtagataggctaggagtggaagcatagcgatatgtggagcggactagtactaatcagtcgagcacttgaccaaagctcaaaggtttagagcggaagattatattcagttttgagtgtaaaagctcagaaagagtacggtggcgatggcaagaaggatacacctgttcccatgccgaacacagaagttaagcttcttaacgccgagagtagttggtgggaaactgcctgcgagggtaggcagtcgccgtgctaaatggaggattagctcagctgggagagcatctgccttacaagcaggaggtcacaggttcgagccctgtatcctccattgagtcgttagctcagttggtagagcatctgacttttaatcagagggtcggcagttcgagcctgccacgactcattggcccagaaaaactcaagcgggtgtggcggaattggcagacgcgctagatttaggttctagtgttttcggacgtgtgggttcaagtcccaccacccgtaccatgccgatttagctcagttggtagagcatctgtcttgtaaacagggggtcgaaggttcgagtcctttaatcggcataaaaattgaataaaaaatgcggaagtagttcagtggtagaacatcaccttgccatggtgggggtcgcgggttcgaatcccgtcttccgcttatcattatcatgccggggtggcggaactggcagacgcacgggacttaaaatcccgcggttggtgacaaccgtaccggttcgattccggtcctcggcatataatgatgcacccttagcgcaactggatagagtgtctgactacgaatcagaaggttgaaggttcaaatccttcagggtgcacacttcgggaagtggctcagtttggtagagcacctggtttgggaccagggggtcgcaggttcgaatcctgtcttcccgattgtagcttaaaaaggaagttacaggatggcggtgtagctcagctggctagagcgtccggttcatacccgggaggtcgagggttcgatcccccccgccgctatagaggtaagcttggacctttagctcagttggttagagcagacggctcataaccgtcgggtcgtaggttcgagtcctacaaggtccataggatcttggctttttttatataaaaacatcgcgggatggagcagtctggtagctcgtcgggctcataacccgaaggtcataggttcaaatcctgttcccgcaatatggtcccttggtgtaggggttatcacgcctccctgtcacggaggagatcaccggtccgaatccggtagggaccgtaatggctcgatagctcagttggtagagcaaaggattgaagctccttgtgtcggcggttcgattccgtctcgcgccattaggaagcaagaagttgcgggtatagtttagtggtaaaacgaaagccttccaagctttagtcgcgagtccgattctcgttacccgcttcaaaggaaaaggggcctatagctcagctggttagagcgcacgcctgataagcgtgaggtcgatggttcaagtccatttaggcccattggagatttactcaagtggctgaagaggcgcccctgctaagggtgtaggtcggtttataccggcgcgagggttcgaatctctcaatctccgctttgcagatgtgcttcattttttttaatggagcattttattttcctttgatttaaagtctgtaaagtaatacatgctgtttgaggcaagcgcgaagcagaggcaggaagccaagcaaagagcttgtcaagggagcagaaagatgataatattataaagctgtcatttgagaaagatgaggggcaagaaaaataacttgtcaaagctcaagagacatgatataatataaaagttgtcacacggcaacggtagtaccttgaaaactgaacaaagtttcgctgaaagtgtgcgggatataaaaaatcccaaacaaaagcgaagtcaattcgcaagcaataaatttgagataactcaaagaaagttttagagctaaacgataaaaagctcattttcaagaaggaaaatgagagtttgatcctggctcaggacgaacgctggcggcgtgcctaatacatgcaagtcgagcgagcttgcctagatgaatttggtgcttgcaccagatgaaactagatacaagcgagcggcggacgggtgagtaacacgtgggtaacctgcccaagagactgggataacacctggaaacagatgctaataccggataacaacactagacgcatgtctagagtttaaaagatggttctgctatcactcttggatggacctgcggtgcattagctagttggtaaggcaacggcttaccaaggcaatgatgcatagccgagttgagagactgatcggccacattgggactgagacacggcccaaactcctacgggaggcagcagtagggaatcttccacaatggacgcaagtctgatggagcaacgccgcgtgagtgaagaagggtttcggctcgtaaagctctgttggtagtgaagaaagatagaggtagtaactggcctttatttgacggtaattacttagaaagtcacggctaactacgtgccagcagccgcggtaatacgtaggtggcaagcgttgtccggatttattgggcgtaaagcgagtgcaggcggttcaataagtctgatgtgaaagccttcggctcaaccggagaattgcatcagaaactgttgaacttgagtgcagaagaggagagtggaactccatgtgtagcggtggaatgcgtagatatatggaagaacaccagtggcgaaggcggctctctggtctgcaactgacgctgaggctcgaaagcatgggtagcgaacaggattagataccctggtagtccatgccgtaaacgatgagtgctaagtgttgggaggtttccgcctctcagtgctgcagctaacgcattaagcactccgcctggggagtacgaccgcaaggttgaaactcaaaggaattgacgggggcccgcacaagcggtggagcatgtggtttaattcgaagcaacgcgaagaaccttaccaggtcttgacatccagtgcaaacccaagagattaggagttcccttcggggacgctgagacaggtggtgcatggctgtcgtcagctcgtgtcgtgagatgttgggttaagtcccgcaacgagcgcaacccttgtcattagttgccatcattaagttgggcactctaatgagactgccggtgacaaaccggaggaaggtggggatgacgtcaagtcatcatgccccttatgacctgggctacacacgtgctacaatggacggtacaacgagaagcgaacctgcgaaggcaagcggatctctgaaagccgttctcagttcggactgtaggctgcaactcgcctacacgaagctggaatcgctagtaatcgcggatcagcacgccgcggtgaatacgttcccgggccttgtacacaccgcccgtcacaccatgagagtctgtaacacccaaagccggtgggataacctttataggagtcagccgtctaaggtaggacagatgattagggtgaagtcgtaacaaggtagccgtaggagaacctgcggctggatcacctcctttctaaggaaggcgaaagatgatggagagtgcgagagcactaaagagaagtcatcgagaaagccaagcggaagcacactgagaaactttgtttagttttgagggtattacctcaaacaacttgaataacaagccaagcacaatcgggcctatagctcagctggttagagcgcacgcctgataagcgtgaggtcgatggttcaagtccatttaggcccattcaaagtgaaagctttgataaaaggcaatgatgggggcttagctcagatgggagagcgcctgctttgcacgcaggaggtcatcggttcgatcccgttagcctccattgagaccttgtgtctcaagggttagtacattgaaaactgaatataatctaaagcaaaaaaccgagacaatcgaaaaaacagattgaagagcgaccgagaagagagagaaactcaacttgaaataggtcaagtagaaaagggcgcatggtgaatgcctaggcactagaagccgatgaaggacgtgacgaaccacgaaaggcttcggggagcagtaagtaagcgatgatccggagatatccgaatgggggaacccaataccgcgaggtattatcaagagctgttaaggctgttgaaggaagacgcagtgaactgaaacatctaagtagctgcaggaagagaaagaaaaatcgatttcccaagtagcggcgagcgaacaggaaagagcccaaaccagctggcttgccagttggggtagtaggactgcaataaagtacttgaagcgatagcagaattatctggaaagataagccagagagggtgagagccccgtaagcgaaattgcagagagacttagcaggatcctgagtaggtcgggacacgaggaatcccgattgaaaccgcgaggaccatctcgcaaggctaaatactaactagtgaccgatagtgaaccagtaccgtgagggaaaggtgaaaagaaccccggaaggggagtgaaagagaacctgaaaccgtgtgcctacaagtagtcaaagcacattaaagtgtaatggcgtgccttttgtagaatgaaccggcgagttacgttatggtgcaaggttaagtcagaaaagacggagccggagcgaaagcgagtctgaagagggcgagagagtatcatgacgtagacccgaaaccaagtgacctacccatgaccaggttgaaggcgtggtaaaacacgctggaggaccgaacccacgtgagttaaaaatcgcggggatgagttgtgggtagcggtgaaattccaaacgaacttggagatagctggttctctccgaaatagctttagggctagcctcgtgtgaatgataatggaggtagagcgctgtttggactaggggcccgtcaggggttactgaatccagataaactccgaatgccagatatcaatgcacgggagtcagactgcgagtgataagatccgtagtcgaaagggaaacagcccagatcaccagttaaggtccccaaatctatgctaagtggaaaaggatgtggagttgcgtagacaactaggatgttggcttagaagcagccaccatttaaagagtgcgtaatagctcactagtcgagtgacgctgcgccgaaaatgtaccggggctaagcatagtaccgaaactgtggatgcatatcaaaggatatgcgtggtaggagagcgttctaagagcggcgaagttagatcgagaggactaatggagcgcttagaagtgagaatgccggtatgagtagcgaaagataggtgagaatcctatccgccgaaagactaaggtttcctggggcaggctcgtccgcccagggtaagtcgggacctaaggtaaggccgagaggcgtagccgatggacaacaggtagagattcctgtactgaaattgttcgataagagcaaaggagggacgcaggaggctaatgacgcatgtagctggaaaaacatgtgcaagcagtaagaaaaaagatgagtcaaatgcttatttttagatttcaagctgtgacgcggagtgaaatcaaagtagcgaaggtcatgatgtcacactgccaagaaaagcttctagccagagcaattttacccgtaccgcaaaccgacacaggtagtcgagtggagaacactcaggtgagcgagagaactctcgttaaggaactcggcaaaatgaccccgtaacttcgggagaaggggtgctgatggtaaaagatcagccgcagtgaataggcccaaacaactgtttatcaaaaacacaggtatctgcaaaatcgtaagatgacgtataggtgctgacacctgcccggtgctggaaggttaagaggagagcttagcgcaagcgaaggtttgaattgaagccccagtaaacggcggccgtaactataacggtcctaaggtagcgaaattccttgtcgggtaagttccgacctgcacgaaaggtgtaatgatttgggcactgtctcaacgagagactcggtgaaattataatacccgtgaagatgcgggttacccgcgacaggacggaaagaccccatggagctttactgtagcttgatattgagtatttgttaaacatgtacaggataggtaggagccagagaaagtaggacgctagtcttactggaggcaatgttgggatactactcttgtttgatggatcctctaactcgcagagctgagcgttctggaggacagtgtcaggtgggcagtttgactggggcggtcgcctcctaaaatgtaacggaggcgcccaaaggttccctcagaatggttggaaatcattcgcagagtgtaaaggtataagggagcttgactgcgagaggtacacctcgagcagggacgaaagtcgggcttagtgatctggtggtactgcatggaaaggccatcactcaacggataaaagctaccctggggataacaggcttatctcccccaagagttcacatcgacggggaggtttggcacctcgatgtcggctcgtcgcatcctggggctgaagtcggtcccaagggttgggctgttcgcccattaaagcggcacgcgagctgggttcagaacgtcgtgagacagttcggtccctatccgtcgtgggcgtaggaaatttgagaggagctgtccttagtacgagaggaccgggatggacataccgctggtgtaccagttgtcttgccaaaagcatcgctgggtagctatgtatggaagggataagcgctgaaagcatctaagtgcgaagcccccctcaagatgagatttccgatgcgtaagcagtaagacaccttaaagacgatgaggtagataggctaggagtggaagcatagcgatatgtggagcggactagtactaatcagtcgagcacttgaccaaagctcaaaggtttagagcggaagattatattcagttttgagtgtaaaagctcagaaagagtacggtggcgatggcaagaaggatacacctgttcccatgccgaacacagaagttaagcttcttaacgccgagagtagttggtgggaaactgcctgcgagggtaggcagtcgccgtgctcttttttaatattccggcttagctcagttggtagagcacctgactgttaatcaggttgtcgtcagttcgagtctgacagccggagtttatggcaataataaagtaatggagtgttgtccgagtggctgaaggagcatgattggaaatcatgtatacgggctttacctgtatcgagagttcgaatctctcacactccgttgggaaatatttttcgccataatgtgtatttcatttattgagtaattttcaaaaaaagttcttgatttttgaaaatcatctgatatagtaatatatgtgctcaattatgagatctgacccgttggtcaagtggttaagacaccgccctttcacggcggtaacatgagttcaaatctcgtacgggtcattgccatatcaaatatggttgttggaggattagctcagctgggagagcatctgccttacaagcaggaggtcacaggttcgagccctgtatcctccatcgttcatggactaccgaatatggtagtctttttttgtgtttaaaaattaatgaacgaaattttgtatatattgttattcggttaaggtcccgaaaggattcgctttttaacgaagatgccttgtaaccgaaagatgggggactctatgagaaaagaaaagcgtttatttacttcagaatcagtttcagaaggacatcctgataaggttgctgatcaaatttctgatgcaattttggatgctattttagctaaggatccaaatggtcgtgtcgcatgtgaaactacagttactacaggtcttgtattggtagttggtgaaatttctacttctgcttatgtagatattcaatctgtagttagaaagacaattttagaaattggttacaatcgtcctgaattaggttttgatggtaataattgtgccattttagtcgatattgacgaacaatcgagtgatattgctggcggtgttaatgaatcactagaaacacgtgggaatcatgaagataaagatgatttagataaaattggtgctggagatcaaggtttaatgtttgggtttgcgattaaagaaactcctgaattaatgccacttcctatttctttagcacattcattgatgagacgagttgctagtcttcgcaaagaaggacgtcttgactggctaagaccagatgcaaaggcacaagtaactgtggaatacgatgatgataataagccaaaacgtgttgacacagtcgttatttctactcaaactgatgcaacagtaactaatgatgaaattcgtgaagcaatgattgatatggttattaagaaagttattccatctcaatatcttgatgaaaatactaaattcttaattaatccttctggacgctttgttattggtggacctaagggagattctggtttaactggtcgtaagattatcgttgatacctatggtggatatgctcgtcacggtggtggtgcattttcaggtaaagacttaacaaaagttgaccgcagcgctagttatgccgctagatatgttgcaaagaatattgttgctgctgatttagcttaccaatgtgaaattcaacttgcttatgcaattggagttgctcacccagtttcgatcatggttgatactcatggaacaagcaaagtaagtgaagatttattagttgaagctgttagaaatgtctttgatttaagaccagctggtattattgaaatgcttaacttaagacgacctatttaccgtcaaacggctgcttatggacattttggaagaacagatattgacttaccttgggaacatactgataaagtagaagctttgaaaaaatatgtgagtgagcatgcaaaataagagtaatactaaaattgtcacgattgccatctttttgacgacctttatgactgcaattgaaggtactattgtttcaacggccatgccaactattgtttctgatctgaatggattagaaatcatgaattgggtagtttccatctttttattgatgactgctgtttcaacaccaatttatggaaaattagctgatagtatcggcaggaaacctgtttttctatttggaattgcagttttcgtagttggttctgcgctctgcggaattgctcaaaatatggtagaactaatcctctttcgtgtgattcagggattgggttcaggtgctgttcagccagtggcagttacaatcatcgctgatttatatacgcttgaaaaaagagccaagatgttaggattgaactcaggcttttggggagtagcttctgttattgctcccttactaggtggatttattgtacagcatctttcatggcattggattttttatattaatgtgccattaggaatcatagcctttcttttggtcatcttcttcttaaaagaaaagaaaaccagcagtaattctacgttagacttaaaaggaacaacttgcttggttatctttttgttggctttaatgatatttttacaagagttagaagatggcttaaatttagtcttactaggcttagtcgctatcattattatttcagctattatctttttcaaaactgagaaaagggcaaaagatccaattatgccattagatatgttgagtagtaaagaatttacaatgattaacttgattacactacttatttctggcgtagtaattggttttgaattttacattccgacctggatgcaagggataaatgctacaagtgcgtctgttgctggctttgcagtaacaccaagttctttaatgtggatcgtaggctcatttttaattggtggtatgttaggtcgatgggggataaagaaaacatatgattatatgttgcttatcttgataattgccgatttagcattaattttagttccaatttacacatcgttttgggtattttgtctaattgcagcctttaacggaacagcttttggggctattactacagcttcacaagttcgctctcaagtactggttggacgcgataagattggtgttgcgactagttttaatacactaatgaaatatttaggacagacgatgatggtatcgatctatggtattacttttaatatggtcgtagccaaacatttagcgcattatccaaatttaacgcaaaagatgatgaatgatattgtttctgctgataaggctaaacatttagcagctaatttaatacctggtttaagacaagtattattgagcgggttaaagtctgtatatgtagtttctctaattgttattgttttatctttgattcttaatcaactctataggcaaaagaaaattgccaaataaaaagcgctagctgagattagtctagattagatctcagttagcgttttttatttatgcttttttaagtaagaatggtagagaactgaaaagcctagcagaacaaaagtagtaccttctagccacccaccgactacataagaaggataatgaacatggcagaagattcgagtataaccgataaacagtggaaaaataagccaaatagtaattagcgtagtgcgccaaaatttatttttgactaataagatagttaaaataattagaattccgaagaaagttgcgctgccaacagaatggcctgatggaaaactataaccatctgcaaaaactaggtgatgaactaaaggacgatgacgttcaactgcatgcttagtaatccaattgtagccattggcgcatatcattaatccagccgaaaagaaagcataactaaattttttggcgataagcaagccgatgaataaaacaatagttgcaattgttaaagtactagtattcccaatcacagtcaacttagttgcaattgctacgctgactgggttgttattagaaataagatgaataattgcttggtcaaaagaatgaataaatggatttttatatatgactaagagggcccagattacatagagaattaaaaaataaatcctggaaccagtgtgtcgtgaacgactaaattgttatctttctttttcaaaaaaatttctccccttgtaatttctagtagatgtggtaaattataatcattatccataaaaaaataaagactagggagtagtaacaagtcataattgtttttagagatgagctggttaggtgcaaagcttaacagttgtgctgtgaacttaccctaatgataagtctatcgtttgccttccgcgttaaggggcatgagtgtcacacataatctgtgtggaacttaggtggtaacgcgaaaatgaagttcgtcctatgatttttatcatagggcgttttttaattttaaggagagatttaggtgtacaatcacaaaaccgtagaaaaaaagtggcaaaaatattgggcagagcatgatacttttaagacaggaaatgatcctaagaagaaaaattattatgctttagatatgttcccatttccatctggcaagggacttcatgtaggacacccagaaggctatactgcaactgacattatctctagaatgaagcgagcacaaggttataatgtgcttcatccgatgggatgggatgcttttggcctgccaacagaacaatacgcattaaagactggtgaagatccagaaaaagttactaaagaaaatattgctaactttaaaaaacaacttaataagcttggcttttcatatgattgggatcgcgaagtaacaacttctgaccctaattactacaagtggacccaatgggtttttgaacaaatgtacaaaaaaggtttagcttatgaagctgaagttcctgttaactggtcaccagatttaggaacagttgttgccaatgaagaaatcgttgatggtaaaactgaacgtggtggttacccagtttaccgtcgtaatatgcgtcagtggatgcttaagatgactgcttatgcagatcgcttgcttgaagatttagacgatttagattggccagaaccggttaaagaaatgcaacgtaactggattggtcgttcagaaggtgcacaagttacttttaaggttaaagatagtgataagacttttaatgtctttactactcgtccagatactttgtttggtgttagctacacagtgcttgctcctgaaagtaaattagttcaagaaatcactactcctgaacaaaaagcggcagttgattcttacattaagaaaattgaatctaagtctgaccttgaaagaactgatttgaataaggataagaccggtgtatttacaggtgcttacgcaattaatcctgttaatggcaaggaagttccagtttggatttctgattatgtcctagcaagttacggtaccggtgcagtaatggtagtgccagctcatgatgatcgtgattatgcttttgctactaaatttggtttaccaattaaccgagttattgaaggcggagatttagaaaaagaggctttcactggtaatggtaagcatattaattcggacttcttagacggcctagataatgaagaagctaagaagaaaatgattgaatggcttgaagatcacaatgctggtcaaaagaaggttaactataaacttcgtgactgggacttttctcgtcaacgctactggggtgaaccaattcctgttattcattgggaagatgtcactacttcattagttcctgaagatgaattaccacttcgtctgccacatgcaactgacattaagccatctggtactccagaaagtccacttgctaacttaactgactgggtaaatgttgttgataaaaatggtcgaaaaggtaagcgtgaaactaatacgatgcctaactgggctggttcttcttggtactacttacggtatattgatccgcacaatgataaagaattagcagattatgacttacttaaaaaatggcttccagtagacctttatattggtggtgcagaacacgcagttcgtcaccttctttacgctagattctggcacaaggtactttatgacttaggtgttgtaccaaccaaggaaccattccaacgtttgtataaccaaggcttgattttgaagaatcacgaaaagatgtctaagtctaagggtaacgtagttaatccagacgatgtgattgatgaatatggtgccgactcacttagaatgtatgaaatgttcatgggcccacttgatgcttcaatcgactgggataacaatggtccagcttcaactaagaagttcctagatcgcgtatggcgtctatttgttaacgatctcgacttaaaagcaattccgcaagaaagaattgttgacaaaaatgacggtgaacttgataaagtttatgctgaaaccgttaagaaagttacagaagattttgatgccttacactttaatacagcaattagtcaaatgatggtatttataaatgctgctcaaaaggctaagactattccacgtgaatatgctgaaggttttgttaagttgcttgctccagtggcaccacacatgatggaagaaatttggcaagtctttggtcatgatgaatcaatctcttatgctaaatggccagaatatgatccagctaaattagttgaatcaactgttgaaattatggttcaagttaacggtaaacttcgtggaaaatttaaggctgctaaagattctgctaaagatgccttagaaaaagaagctctttctcttgaccatgttcaaaaattcttagatggaaaagatgttaagaaagtgattgttattccaaacaagatcgttaacattgttgctaagtaatttaagtttttcctaaataattaatatttgtaaatactgtttacattaatgagtaatatataattcagacgcttaactggatatagggaaaatttatttttatggaaaataatactaaaaatactaaagagacaatggtcaaaggttccgcatggatgacctttggctctattgtgtcacgaattttaggtgcattgtatattattccttggtatgcctggatgggaagccatggaaatattgctaatgccctaacagcgaaaagttataatatttatagcttatttatcattatttctacggctggtattcctggtgcagttgctaagcaagtagcgaaatataatgctctaaatgaatatgacattggacgtaagctgtttagacgtggcttaattttgatggcaatttttggcgtaatttgtgctgctatcatgtactttggtgctccgattttagccactgacaatattattggtgcactcttacatggggcagaaagtgatccacgacaagttgctgtaatgagaagtttatcttatgcagttttaattattccaattttgagtattatgcgtggatatttccaaggttatgcagacatgatgccaccagctatgtctcaatttgttgaacaattagctcgtgtattgtggatgcttttaacagcatatatcatcatgcaagttcaacatggttcctatgttcatgctgttgttcaatcaaatctagctgcagctattggtgcagtatttggaattttgcttttagtttggttcttataccgtagaagaaatgaattaaatgcattgatggagcattcaaatcatgcaattaagatttcaactgctggaatttttttggaaattattaatcaatcaattccatttattatcattgattcaggaattacactatttcaattgattgaccaatatacgtttcacccaatgattgctatgtttgttcatgcaagttctgatcaaattgaatcatggtatgccttatttggattaaatgccaataaattaatcatgattatcgtgtctttagctactgcgatgtcagtaacagccattcctcttttatcgggtgctcatgcaagacgcgactatgcaagcatttctagtcaaattgagaacacattggaattattcctatttgtgatgattcccgcctctttagggatggctgcaattgcaacaccaatttatacgattttttatggctatgatccattaggttcaaatgtcttatatttgtcatcttttacagcaatcagtcttggactttttacggttttaatggcaattttgcaaggtttatcagaaaatggactagcaataaaatacttagttttgggaatcattattaaatttgcggttcagttaccaatgattcaattatttaaggtatatgggccacttttagctacaaatattggattaattatcactatttggctgtccttgaaacatttaaaggttagatacaaatataatagtggtcgcacatcgagaagattcattggaattgcaattttctcaatggctatgtttgtcgtagttactggagtggttgattttggtggaaaaatcatttcgcctgaacggcgtccaacttcctttattttagtaatacttgctgttgccattggtggcattttgtatgcattcctatcattgaaatttggtttagcacaaaagatcattggaccaaaggttaaccgggtattagcaagattgcatattagaatttaagaatgtagagaaaaaggaaacttagtaattatagctaagtttccttttttgcccctgccaaggaagttcattatataatattttagagaaagtgaggaagaaaaaatggataatatgcttgtatatgctgcaaaagaaagaaaaaactttagtgaagtttctttaaatgagatagatagcatgatcttttcacagttagcatattgcaattttgaacttcttcctcaagttactaatttacgagatttgacttcagatgatgaaattaaaactttaacgcaaggaaatctcggtggaaaaaatactgaaaaattaatcaagattatgattaaaaatccacgttttaaaaatgtatcttggtatcaagccgttagtaaggtagatgcaaaaacgcaaatgcagtttaatgctgttaccttttatattgctgacggtgagtattatgttgcttaccgtggaacaacagcgacgactattggttggaaagagaactttaatatgtcgtttagggattgggtaccagctcattattttgctcgttcatattatcgccaaattaaagataaatttcccgggaaattttatattggtggtcattctaaaggaggtaatttagcttttgctgttgcattaggtttaaaagaattcgatctggctaatatcgtcagaattgactgctttgatggacctggctttcataaccaagcgcgattaaaaagtaaattcctaaaattaaaaggtaagattcacaaatatatcccgcaggactctctaattggaatacttcaagatgatcttattggagaaaaagattattgcacaattgtagcagcttccggtgtgaatatccttcagcatgacatgtttaattggcgcgttaaaaatgacaagtttgtgactttaaaacaactagatagcacgtctgaaatttcttggaaggcaattgctgaatggctaaaaaatactactgatactgaacgaagagattttattgaaatgttgtatttaactgttagtgatactaatcaaatttattttagaaatatattaacgcctaaaaccacatacaaattagctactcgactaattaagaatagttctggtcaaaaagaagtgtgggagccaataattaggaagttgtttcaagcgtatgttaactcaggtacaacaacactcagtgagcagcgaagaaataatctgatgaattttaaaaacattttagatgaacaacggcgataggaacaataaattaaaaatttcccgctttacttggaaaaagagtaaaataacgtttgaaagaggtggacaaaattgaaaaaagatacatatatgaccttgctaggattgcgtgatacctgttataacaatttcaattttgatattgatgaaaaagatttctatttaggaaccgatacatataaaaagatagataagatcttaaaagattcgcaagatgaacaacttctagttcagtttgaagaaggtacgcatctttatcaagattatgatccagaatatttgagtgtcgctcaaaagagagaggtgcaacatgatattaatgcagcacgtgactttttggataactatgatgggagcgtcgatgacaagcatgataattattcagcttacttagatgacaattcattaagctattcttttggcgcagatagtaatttagatgaagtgcaaaataatttaaatgacatcgaaactgctggtgttattgtttggcaaagaagaaaagatgaatatatcttactcccacatactattcacagccttgaaagaattaaaaagcaaatttcatcgaataagcatgttgatgataaaaaacttcgttatgcaatggagcgtttgtttgacaatataactgatttccttaagccatttagtgatagcgaactaggaaaatatgaaaattcaatttctgaagagttaaaagataattttgagcattatgctttaggcgttcaaacagatgcacgagaagtagcagctgataaattaacaaaatatgctgttgaacttgcagaaaaagaaaataacgataaattataaggttgaagctcatcggttagatgggctttttttggataagattaaaatgaaaagtatttcaaaagaactaatatctgaagtaattaaaaagcgaaaaagtgctacacataagggaaattatgggcgagtactattaattggcggaagtaaaaaatatggtggtgcgctcattatgtctgcagaaggagcgctaaacagtggtgctggcttgactactgtggcgacagattcagtaaatattaacgccttacatacacgagatcctgaaattatggctcttgattggaaaaaaagagatgagttaaaaaatctaattgttagttctgatgtagtagtttgcggaatgggacttggtttagatgatcaggcacaagatattttagctcttattagagatagcattacctcaaagcaagtattaattttagatgcaagtgcacttgatttaattagtcagcaaaaagacctattgccagtaaactcaaaattagtaatttttacacctcatcagatggaatggcaaagattaagtaaaataaaaattgctgatcagactgatcaattgaatcaagcttttttaaatgagttagttcccaggaaaaatgcaattttagtattaaaatctaaccatactaaagtttacgatcaagcaggaaatatctatcagaatccttttggtaatcccggaatggcgattggcggaatgggagatactttagctggaattattggtggtttctgcggacaatttacacctaatttagcaactgtcgcaggtgctgtgggtctccattcaataactgctgatgaaattgcaaagaaacaatatattgttcgaccgacacagctgtcagcacttattcccgcaatgatgagaaaatatgagaagtgaataaaatgaaaaagataaatagatatcaaaattctgttttaattattggaacaatactagctattttagtattagcaattattttatttcctcatcgtaatgtatcgcttgcaactccgaataaaatagtaaacagtaaagtaaccaaaaaagtggctccaaaagttaaaaaagttacacaaaagaattccaacctaccatattctgatcctgaagatttacaaccagctggcagctggaaggttaaaagcgaaagtaaggcacaccctgatttattaagcttaagtaatttatggataagagtgtcaattaagggcaatcgtgtttatattatggatggtaataagccagtttatacaatgcttgcctcttgtggtgtatatcataatggaaaatctgcaacaccaactggaacttatgctgtcgaagctgaaagaggagcaatcttttttaaccagagtctccaggttggcgcacgtacttatattagctggcacggccatggaacttatctttttcattcagtcccaacagatggtaataataaaatcatgaagaatgaagcaaagaaacttggtaaaactcaagcctctcatggttgcattcgcttgagcattcctgattctaaatggctatatgaaaaattgcctgtaggcacaaaagttgtagtaaaagataagtaagttaaaatacataacaagaaataggtgacaggatgagacatgcaaagaagaagtctaagaaaaatttcttgtggataataggaatagtagtaattgctatttgttttttgctgtggaaaaacaactttggtccgaatagcatgccgtcaaattatcatgctaatcaagtggacttaaatgttaaatccgctgtagcaattgatgccaagaatggaaacgtcatctacgctaaaaatgctaatcaaagtttgccaattgcttcaatgactaagttgttaactgcttatttaactctaaaagcaattaaagaaaagaaaatttcttgggatacaactgttagtcccactcaagagatcattaacttaggttctaatcctgattatgccagcgtaccgcttaatttaggtcattaaagagctgtatgatgcagctttgataaaatcagctaataatgcagctcgtatgctagcaattgcagtcagtggaaatgagactaattttttaaatcaaatgcggcagcaagctaataaatggaaacttcataatgttaaatttgtgacggttgatggtttaccagagaaaaagaaaaatttcttagggatgacaacgacaattgaaaacaaaatgagtgctaatgatatggcaattattgcgcgaaaactagttacagattatcctgaagttttaaatacgactaaagtagcaaaaacttattttagaaatactttgatgactaatagcaataagatgctaaatgggctttcagactatgatcctaattatcctgtcgatggtttgaaaaccggaacaactgatggagctggctcttgctttacttgcacagtagataaaaataataagagagtaattacagtaattttgggtgctcaaaatgataatgagcgtttttcagaaacaaaaaagttgttaaattattcttttaattaaaatttagctatgaattcgttttaatattgcactttggttaagattgctgatataattttcatgataaagagttaaaagtagtaatattgaatctattttcagcgagtctatggttggtgtgagttaggcaatggagcaatacgaaggcgtgtttaactataattttaaaatcaattaataagcggatactttgtatcaaatagagtggtaccgcgggaaactttctcgtctctttctaggttaactaggaagagactttttttatgcaagaggtgttatcagtggattttaaacaaaaagtcgtagatttagttagtgaacaggtagatttacccaaagaaaaaattgtaatgttaattgaaagaccaaagaatgctaaaatgggaaattacgcttttccagcatttgctttggctaaaattgaacacaagaatccagctctaattgcaaaagatattgcagaaaaaattaatgatgataactttactagtattgaagcagttggtccatacgttaactttgcaattgatcatgctaagctagttaatgcaactttaaatgatgttttgacagaaaaagaccattttggtgatcagcaattaggcaaaggtaatgtgccaattgatatgtcatctcctaacattgctaagccaatgtcaatgggacacttgcgttctactgttattggtaattcgattgctaaaactttagaaaaagttggctacactccaattaaaattaattatcttggagattatggtacccagtttggtaaattgattactgcttaccgcttatggggcaatgaagaggacgttaagaaagacccaattactaatcttttccattattacgttaaattccatgaagaagctgaaaaagatcctaagttagatgatgaaggacgtgctgcctttaagaagcttgaaaatggggacgaggaagaaattaagttgtggaaatggttccgcgaagtttctctacaagaatttaaccgtatttataaagaattgggcgtaacctttgattcatacaacggtgaagccttctttaacgataaaatgcaaccagtagttgatgaattgagagagaagggattgctagaagaatctcgcggcgctcaagttgttaacttaggtgaagatgaaaatccagcattaatcttaaaatctgatggttctagtctttatatgactcgtgatctagctgccgcattataccgtaaaaaagagtatgacttcgttatgtctctttatgttgctggtggtgaacaaagcggtcactttaagcaattaaaacaagttttgaagaaaatgggatatgactgggcagacaatattcaccacattccatttggtctgattactcaaggcggtaaaaagttatcaacaagaaaaggtaatgttgtctttttagataaggtattgaaagatgccgtttctttagcagagcaacaaattgaagaaaagaatcctaacttagctaataaagaccaagtagctcatgatgtcggcgttggtgcagtagtatttcacgacttaaagaatgatcgaatggataattttgactttgacttagaagaagttgttcgttttgaaggggatactggtccatacgttcaatacaccaatgctagagcacagagtatcttgcgtaaggcaaataaagaaatctcaatggataatttgagtttaaatgatgattggtcatttgctgttgctaaagctatagctgatttcccagctattgtagcaaaagcttcagaaaaatttgaaccatcaattattgccaaatatgcgttagatttaagtaaaaaatttaataaatattatgcaaatgtgagaattttagatgaagacgatcaattaaatgctcgtcttgcattagttcaagcaacttcaattgttttaactgaagccttaagacttttaggtgtaaatgcgcctaaagaaatgtaatatttttcaaaataaaaatattcactgaatttttttgagctaaagtatgttaatttttgcactaatgggttaaactaatgatgtgttaaaaatttaggaggtatttttttaatggcttatttagtaaatggtaatgacattttcaaagctgctcgtgaaaaccactatgctgtaggtgcatacaacactaacaaccttgaatggactcgcgcacttttaagaggtgctaaggaaactagaactcctttattgattcaagtttctactggtgctgctaagtacatgggtggttacaagactgttaaggatttagttcttaacgaaatggataacatggatatcgatgttccagttattttgaacttggaccacggtgactatgaatctgctaaggaatgtatcgcacttggttactcatcagttatgtttgatggtcacaacttaccaactgacgaaaacttagctaagactaaggaaatcgttaagttagctcacgaaagaggtatctctgttgaagctgaaatcggtaagattggtgaaaaccaaggtgccgatggcggtgaattagcatctgttgaagacgctaagactttcgttgctgctggtgttgacaagcttgcttgtggtattggtaacatccacggtgtttacccagaaggctggaaaggcttgaacttcgatcgtttgaaggaaatcgcagaagctgtaccaggtgaaccacttgttcttcacggtggttctggtattcctcaagaccaaattgaaaaggcaattaagttaggtattgctaagatcaatatcaacactgaattccaattagcattccaagctgcaactcgtaagtacatcgaagacaagatggacttagacaaggacaacaagggttacgacccacgtaagcttttgagagctggtactgacgcaattactgattctatgaaagaaatgatttcatggatgggtactgcaccaatcgactcaaaggaatcatcagttaagtttgacgaagcttcattaaacgaagaataatcaactaattctattaaaaaagacctcagtttttctggggtcttttttgtttaggtgagataaatagcaatgcatgtcgaattttacgaaaagggttgtaagagcttctttaaaaagtacaataagcaaaaagatattattgtaaaattggtcgaagctgcaattgataaagaagtagctagtgggatgacgaaggttaaattggcgaccagaaaaagagtaaatgataaaaatatttatgaatttcggcttaatgctggcacaataggttcgattcgaattgcattttcaactttcgataaaaaaacaatagtctactttattagcaaaaaccttcaaaaatcagcatttagtaaagattttgacaaaataattgctaagctataataaaatatttttagcgctatatatattaaaaagtaagagtttattactatgaaaattttgaaaattaatgctcttgatcaagaaacagaaaataaattattagtaatttgggaaatcagcgttagagctacgcacaattttttatcagatccagaaattaataatattaagaaatatgttcctcatgctttaagaggagtatcgcatttaattgttgcatatgatgagaatgaaccaattgcttttatgggaatcaatgaccaaaagttagagatgctttttgttgatgctaatcagcgtggaaacggaattggcaaagccttgattacttatggtattgataatttagatattaatgagcagaatccaggagctcgtggtttttatgaacatatgggatttaaagcagtagaaagatctgagtttgatgatcagggaaatccttatccgattttagtaatgaaaggagattaaagtttacagaaagaagtgatcacatgtctttaacagttaatctttattacactggtaaaagcggaagtgctcgtagatttgctgaagaaatggaaaaaagtggtgtagcagatcgtattaggcaagagccaggtaatgaaaagtatgattatttcattcctctagatgatccagaaacaatccttttgattgatagttggaaagatcaaaagtccctggatgcacatcatgcttccccaatgatgaaagaattggcagatttacgtgaaaagtatgatcttcatatgcatgttgaacgctatgtttcggatgaaaatgggatgccagatacggatcaaaagtttattagaaaatagtaacaaaaaaactcgttgacctatcaatcaacgaatttttgcgttcaatactaaaaatagaggaaaatgaagaatagaattatagatttatttccgacgaacctttacaggaactggaactggtttatttacaatagcggcatttgcagcaagtactgccatagcgctaactcctagaactaataataatttcattaaaccattcctttctttatttgattgatatccatcttaaagtgaagttgtgaattttttgtgacttatatttaagagaaaatctaaaaaactataaataattttattccctttataaatacgaacaattttgcaatattaagtaaaaataattaataaataagtgtaaaaagactaaaaaaatctctttatttatgttaaaatttcatcattgacgattttagtaaagaggaattacagaatgaataacgatatcgaacgtatattgtatactcaaagcgacttagatagtcgtatggatgaaatggctgcggaattaaatgtaaagtataaggacgaagagccgattgtcgtgcccgtcttaaatggagccatgatttttgctagtgacatgattaagcgattgaattttaagttgactattgatccgattaaggcttctagttatgctggtacgcaatcaactggagaagtaaagattacgcaagatattaagtcagatgtaaaagatcgtccagtaatttttatggaagatattattgatactggccggactttacaagcactcagtgaagtcatgaaaggtcgtggagctaagagcgttgaagttgttgcaatgcttgataagccagaaacacgtgtagtagattttcatgctgattattacggttttaaggcaccagacgagtttttagttggctatggcttagattataatggcctatatagaaacctgccttatgtgggaattttaaagcatgaagtttatgctaactaaggagaacagtaatgcgtgtaaatgttttacaacatactccaaacgaaggaccaggttcaattaaaacttgggctgatcaacatcactatgaattctatgtttatcatcctgaaacttttggtaaactgccaactgtggaagaaacagatttattaataattcttggcggaccaatgagccctaatgatgatttaatttggattaagcaagagagaaaattaattaaagcaatgcttgatgcgcataaaccaatgtttggtgcatgtcttggtggacaacaaattgcaaaaactgtgggtgctaaggttttagatgctccccataaagaagttggatgggcaccggtttatttgaaggatcagactatttctaatatcccggaaaaattaatagctcttcattggcaccagcaaatgtttgaaattccagaaggagctaagttattgttctcaagtgatttagtaaagaatcaaggctttttacttggtgataatgtgattggtttacaatttcattttgaaccagaagaagataatgtgagagaaattgcaattaatgatgttgattatccgttagagaataatgatttacatcaaactggtgaagaaatcattgctcatggggtgccgaaagaaaatcagaaagtaatgtttaaattacttgatttcattactaaataaaaagtgtaaattctagactactaataaaaagtaagctaatatgaagctgtaagtttttcgaggaggaaaataattatggcgaagatttttatttttggtggttctggaagagttgctacagacttaattaaaaacttagtagcagatggcaatactataacagcagccgcacgccatccagaaaatattattaaacttgatggtgttacggcagaaaaattagatttacatactgatgttgataatattgccaagcaagtaaaaggttttgatgcaatttactttactgctggttcacgtggtaaagatcttattcagacagatgccatgggggcaattaagacaatgatggctgctgaaaaggcaggcgttaagcgttacattatgctcagttcgatgcttagtctagatattaattcatggaagaagattccaagcttagaggattatttagcagctaagttctttgcagatacttatttgatggattctacggacttggaatatactattttacaaccaggtagtcttactgaagaagctgaaacaggtaaaattcagctcgatgttaaagcgaccgattcaaatccaatccctgatgttgctgagacattagcagcaattttgaaatatccgaatacaattggcaagattattccaatgagtagtggtaaaacgtcaattgatgatgctttgaaagaaatttaataaagaggaaaaggctccataacggagccttttttagtcttaagaaagtaagctatttaaaatttgaaaatattagaaattgcttctaaatatttttgatctaattcatcaaaattagcaattttagttgaatcaaagtcaaacacaccccataattcaccatttttcttaaaaataggaataacaatttcagaatttgaatcactatcacaagcaatatgtcctgcaaactcatgtacattttttacaatttgagtttgcctttcttttgcagttgttccgcaaactccattaccaatagcgatatgcacgcaggctggttttccctgaaatggtccaaggattaattcatggtttttgtagcgataaacaccagcgaagttaacatcattgagtgcattaaacaatagcgcagaaacatttgctgtatttgcaatccaatcgctttctccgtctactagagcttcagcttgttttactaataattggtagttgttttctgttgttgctgacataagtggtacctcaatttttagtaaatttatttaattttaacacttataaaacatttaatagagaaaattatatttttaatttaaacatttgtctttcttcacatcctaatcagatttatgttagcagtttactttatttgttgtctggattcaaatcgctcataataaaattgagagaaggataaataaagaaaggatttgtccagttatgattggaaaagaaactcaaatacgtttagtaaataaattagaaaatatacaccatgttgttgttcaggcttcagcaatcgatggaaataacgtttttgctttgcagctccttcataaacagagtgatgttattgtttatcaaactccaaatgatagtaaaactgtgacttttaatgaggatcatccaattttatacttgaaaggaccaaattcagccggtacagcaggtggacatactcaaacttgggtacaaagcggagaaaacaataagtggtttgtaggtactaagcctaagcggcatggcaatacttattggactactcaaattgcgcgcgtagcagtttctggatatcaaactcaaacttttaccaataatactgaattaccacgactttcttatcttaaccgagcaggctcaggttatggtgatggaagtgtggcttatcccggaaaggatttagttagggtagaagcagctgtttcaccgaatagacaatattttttgattgcaagtattgacatcaaccatacagggcattttgctgtctataatcttgatgaaattaataaaaagctagatgaagcagaagaaaagactgaagatattaatattcaaaatttgaattgtctaggcgcgtttaatgtcccgcattttaatgatcaaaagattatttcaattcaaggttacggtattgatgataataagaatatttacatttctagtcagcctagcccgtatacaacttttttaggatttccaaaacaaggcaaaccacgtgaaattgttaaaattccctggggaatatccgatccaagtaaatggtcagtggtaaatttagacaacagtttaaaattagatgcactgaacttttgcactgaatttgaaggaattcaagtaactggtgattgcctttatttgactgttgcctatcatcaacgaaacagtgatctgacgactttgatgaatcgaatatatcaggttgaaaaattttaaaaataggcagactattgcgtctgtctattttgttataattggtgaaaaaggggatgtcagaaatcgaagtaatacgttgtagttggggaaacagtaaaaattctctgtatcaaaagtatcatgatcaagaatggggaaaattaaacttagattcaacatatttatatgaaatgctggtcttagaaagctttcaatcaggattatcctgggaaacaattttaaataaacgagaaaattttagaaaagcttttgcaaattttgattatcataaagtagctaaatttaataaggatgattttgaacgattgatgcaagatgaaggaattgtacgcaatcgcttaaagattaatgcagcaattaataatgcaaaaatactagttaaattagaaaaagaaaaccgaacttttgaagaatttctaactgaactcatccctaagccaataatgcaccacccgcaaaagatggaagatattccagcttcggatgatttatctacgcaaatttcaaaagaaatgaaaaagatgggctttaaatttgtgggaccagtaactatctactctttcttacaagctgttggattaattaatgatcacttagatacttgtagttttaagaacgggggactttgatgtctttattactaccgacaaaacaagtagtaattatgtttattttgatgattatcggctggatttgctatcaaattaagtttctacatgagcaaacagttaaggacttaactaagatccttttatatgtagtatctccttgtttaattattaactcatttcggcagtcattttcggctgctagattattacaatttggcctagtattttcattagtagttttcctatttatttttaaaattattactagtcaggcaatttttagtaaaaagtgggtccaagatcgtcagaaaagaacagtattgcgttatgcaggcacctatactaatgccggctttatgggagttccgctagtacaggcaattctaggaactaaaggggtcttttttgcagttccttatttgattgtttataacattttcatgtggacgcatggaattaggatgtttacgcaaaaaaagcaagcatttagagaaagtttggggcaagcaataattaatcctaatattattgcagcagtcattgggatgattttgttcataacgcaatttaaattacctgatgtagtttcagatccgatgaattatatcgctaatttaaatacaccactaagtatgatcgtaattggtacaaatcttggtgcaattaatttaaaagaagattggcatgataagttagcctggagcggggtttttattagaaacttattttttccaatagttattctagggatcttatgcgtcttgccattaccagcaattgccaaaatgactacgttaattatgactacttgtccagttgcaggtgttgtagttctctttagtttacttagtaattttgatgtgaaatttccaacgaaattaatgtgtttatcgactttaggagcgattattaccattcctttagtgatttgtttagctacattgataggcttataagctaaaaggtgaggaaagataatgaaaaaagatagttatttagcaattaatgaaacaaatgcctcaattaaatggatgacaattgcgtctttaatttatctagtggtttattcactagcaggaagattggaatttcagtctcaatcgatttggatgcaaattttgtatttaggtattgtctgcgttttggcaataacctttaaaaagttctataagacagacaaagtttttgttaaattgcctaaagaaggaaaagtaaagattatcacaattattttttgtgctctggtgatcttactctatgctctattgggtagcgtggcaagttgggcagaagtttttgagtcaatgcctgaaatgatgtggggatccatttgtgttgctttggctgcaggaattggcgaagaggtgttatgccgagttttactatttaatttgtttgctaaaatttttgaaagtaaaaagtatgttttagtctgggcttgtttagcctcatcagtcttatttggattatttcatttaattaatttaacgcatggagcatccattaatgctactatgcaacaagtattttacgcaactgctattggattaacattttcatatattcatatttttactaatcgtatttggttgtgtattgtgatgcactttttattagatttacagcccaatattgcaacaatggatgcacagccatctccatggggattaattctattaatctttggtacagcaatgattgtttctttgctttctatttatgcatttaatagaagagctaataaagtgtttgaatattaaaaaagcagatcaaccgatctgcttttttacatacttaacttaatttccaaaaggaatcttgtaaaggaaaattccaataattgcccctagagtaggagcaacaacagggatccaaccataactccagtgtgcaccaccctttttattagggataggtaataatgagtaaacaagtcttgggccaaagtcacgtgccgggttaagagctggaccagttggaccaccaagtgccataactaaagcggtaattaagaatcctacaccgatgttagcaatatcgacagcttgcttgaagaacatccctttgtagagaccaattgcaacaaacattaaaactgcagtaccaacaacttcggaaataaaaccgttccatttgctgttagtacagtcgctagtagcgaaacaagaaaatacgatatcagggttggtagattctttaaagtgtggccaatatactgctaaaacaagaagctgaccgcaaattgcacctagtaattggcaaattatataaggagcaacttgtgaccatgggaagttaccagcagctgcttgcgcaacagtaacggccggattaatatggttaccagaaattgaaccaaataacatggcagggagcataacgccaaaaccaaaactgaaagcaactaaaatccaaccaccattagctttaccgtcaggtgcattaccagttgttccttttaagaaagagttggcaactgaaccattaccaaataacactaaaattaaagtaccgaaaaattcggcaaaatacttgagcatccaactatgttccatagatactttttcctctcttgaaaaaataagtgaaaaataaacacagctaatgattatacctaaagttttagaaaaaacatagatattttttaagattcttgcatttttgagcaaaaagtttgcataatataaagataaatgtcttagctctaattacttgatgtaataagggctctttttattgttgaggaagtgctttaatgaacaagaaacagatcaggatggtaacagttgccttgatgctgggaaacgtaatggcgggactagatggaacgatcactaatactgcaattccagcaattgtatcagcgttacacggaattcaatttatgggctggattgtggcaatctatcttttaggaatgtctgtttcaataccaatttggactaaaattggtgaaaaaattactaataagttagcttttgaaattgcactaggtctatttgttttaggatcaactttagaaggattagcgccaaatatctacttcttcttagtggccagaatgattatgggaattggtggcggtggtatgggatcactaccttatattatcgctggttatgtttttcccaatattaaaaaaagaacgcaaattttaggctacttgactgcaagtttcaatggtgcagcaattttagggcctttagtaggaggctggttaattgatgccttatcttggcactgggtattttatattaatattccaattggtttagttgctttattgattgctttaatttactacaagccagtgacgccaaagtctgcgccagtctttgatctaagaggagcatttttattagttagtggtttaattacgtttctaatggggattcaactcttagggttaactgcaacttggattgtagttggattgatattactaagtttggttctcttaattttcttcttcttgcacgaagcaaaggctgaaaatccaattattccattatcaatctttagaaacagagatttgaatggtgatttgattttatttgcaactacctggggagcctttattgctgtgaacacttatttaccaatgtgggctcaggcgcttttagggatgtcagcgttaatgggtggaatgactttaattcctaactcagttgttgaaattattgcttcacaaactgttgctacaattcaagaaaaaattagaacttttactttggtaatgattggaattgtcactatgatgatctcttctggtggattatttttagcaaataatcacactccgttatgggtattaattttagtcggtgctttttctggaatcggtgttggttttatcttcgtagcactccaagtaaaagttcaaattgacgctggaatgaaagatatggcgactgctacttcgacatcttacttaattagaatcttagcgcaaacagtaatggcagcagtatatggtgtgattatgaatctggctttagctagcggaatcaattcacatagcaatatcacgatgaagatgatgaatgaattgagtgatgcaaaatctgctaaattattaccacaacagcttttgccagagatgcgtgaaatttttcatagtggtatccacgaaataatggcagtttcttttattctattgttgattgctactatttttaatttctatttcaacttcaaacagccaaataaaaaaattaaaaattattcaaaatagttcttgtttttaagtaagtgagcaagtatattttagatagattattagccttgattattgcgaaataattggggctttttattttttagaaaagtaggtgtagacatgacaaaaaagcaagtaacgatggtgacgtttgccatggttttagcaaatgtaatggcaggattagatagtacgattattaataccgcgattcccgccattattgcggacttacatggaatccaatttatgggctggattattgcaattatgctcttagggatgtcagtttcaaccccaatttggaccaaagtcggtgaaaaaattggtaataaagccacctttgaattgtcgttgctcttttttgttttaggctctctatttcaaggattggctgataatatgtatttcttccttttggcacgtgctttaatggggatcggtgctggaggaatgggatcgctgccttatattatggctggctttatttttgataatattaaggcaagaactaagattttaggatatttaggtgctgcttttagtgtggcaactattgtgggaccactagtcggtggctatttagtagattctctttcctggcactgggtcttttatattaatattccaatcgggcttttagcgattttgttatcgttagtgtattatcacgaaggaaaaattagaaaaacgcctaagtttgatatactgggttcttttttaatcattgttggattaactttgcttttattagggattcagttgcttggtctaactaagccatggattgtagcaagtttaattattgctggtttagtgttattagttttattctttatgcatgaaggagggcaccccaatcctgtagtaccgattagtatgtttaaaaaccgagctttagtcggtgattttttactcttcatttttagctggggtgcatttttagcaattaatacatatttaccgatgtgggcgcaaggtttgcttggcacaactgcgttaattggtggaatgaccttaattccgaattccttagttgatgtggtaggaactttagtggttaatcccttaaaggcgcgttttaataatcgaacactactttcgatgggattaatttgtattttgatttcgtccttaggactagcactggcaccgcaaagtactaatatttggtggttggcaattattggaactttttctggttttggtgtaggttttatttttgttttgcttcaaattaaggttcaagtggatgctagtgagaagaatatggcgccggcaacatcactttcatatttaattagaattttagctcaaacggtcatggcagctgtttatggcgtgattatgaatgtacagttggctcagggtgtagctgaaaattcgggtataactatgaatatgcttaataagttaagcgatgcggcatctgctaagagcttaccgcagagtttattaccgacaatgagaaatatttttcatttgggattgcaagaaattatgtggtgcgccactgctttgcttgtaattgcaattgggttgaattttatttttaataaaaagtaataaaaaaggttaattgataaatcctgaaaggaaattatcggttaacctttttctgtatacattcaattattaagcacaatatgactttcaatataagaaagcaattcattaacgggcttttgataatcatgaccaacccaccagactaagagcatgtaaataccacctgactgatagctaatcgcataggaaggaagttttaaattaggatgagaataattaattagctctttcaaaaatttggtttgctggttgagtaattctccttctaaaccagcattaaggaataatttcatcagatcaggatgatccttgaaaaatttaaaatagactgctaattgatccttaaagtcagttagtttgtgcattgatagatcatcaataaaattttgatattgaccacgtaaaaaggtaatcaaaatttgatctttctgttcatagttacggtaaaaagccatcctggagactccagcatgtttagttatttgagaaatactgagtgaatcatagggatgattttttagtagcgaaaataatgcattttcgatttgatgttgagtttttagacttttcttattcataattgtctatcttctctcaaaaaaacaagtttgacaaatgtaagcattatcattatgatgtaaattgtaaatagttacaagtgtaacgattattgaaagaagtgtgtcttatgcattatagtaacggaaattatgaagcttttatcaatgcagaaaagccaaaagatgtagataataaatcagcttatattgtgggttcaggattagcagctttggctgctgcagttttcttaattcgtgatggccatatgaaaggtgacaagattcatgttcttgaagaattagcccttcctggtggtagtatggacgctatttataatgtagctgatcaagcatatgtgatgcgtggcggtcgtgaaatggaaccacactttgaaactttgtgggacttatttagatcaattccatcattagattatcctgatcaaagtgttttagatgaattttatcgtgaaaatagaaaagatccatgttactcaaagactcgtgttattgagaatcgcggtcaagagttaccaactgacggggatttgcttctttcaccaaaggctgttaaggaaattttgaacttagtaatgacaccagaaaaagatttacaagataagaagatcaatgaagtctttgatgatgaattcttcaagtcaaacttctggttatattggcaaacaatgtttgcatttatgccttgggcaagcgcaatggaaatgcgtcgttacttaatgcgatttgtacaacacgtagcaactttgaagaatctgtcttcacttcgctttactaagtacaatcaatatgaagacttaattatgcctttgattagttacctaaagaaacatggcgtaaaattccattacgatacaattgtagataacattattgttaaccggactgaagatgaaaaggtagctactgagattaagatgactgagaagggtgagccaaaagttattaagttaacccctaacgatttggtctttgtgactaatggttcaattactgaaagtacaacttatggtgacaatacacacccagctgaacaaaaacatgaacttggaccaagttggcaattatggaaaaacttagcagctcaagatgaggacttcggccatccagaaaaattctgtgaaaatattccagctgctaactgggtaatttctgctacagttacctttactaataatgatattgtgccttatattgaaaaggttaataaaaaggatccgcattctggttctattgtaactagtggaccaactacaattaaggattctaactggttacttggatattcaattagtcgtcagccacaattccataagcaaaagccaaatgaattgattgtttggttatatggcttgtactcgaacactaagggtaattatgttaaaaagactatgcctgaatgtgatgggatcgaactctgtgaagaatggctttatcacatgggtgttcctgaatctgagattaagaagatggcaattgatgcaactacaattccaaatcacatgccatatattacttcttacttcatgccacgtgcattaggtgaccgtccaaaagtggtaccaaagaattccaagaacttagccttcattggtaattttgctgaaactgagagagatactgtctttactactgaatattcagtacgtactgctatggaagctgtctacactttgcttaatgtagaccgcggtgttcctgaagtatttgcatctgcttttgatgtgagaatgttaatgaatgcaatgtattacttaaatgacagaaagaagttaactgaacttgatttgcctttaccggaaaaattgatggttaaagaaggcttgaagaaatttaagggaacttatgttgaagaattattgaagaagtataagttgatttagagaaaaatttgattatttaattaatagggacgagcagaatagcttgtccctattttatatagcattagaaatttgctttttattgaaaagtattttttaattagagaagtaaattatattattagaaaagagaaggatttttattttagacgaacaacccgcccgatggggctctaagaattatcgtaaagttaaagatttatattatagtgcttttccagaatgggaaagatttccatggatgtcgatggtgttaatgagcttacgtaggaagcttcaacttaatgccgtctatgacggagaagtattttgcgggatggtttgttattacattagtgataatactgtttatctagcatacttagctgttaaaccagaactgcgtggtaatgggtatggaagcaagattttacatatgcttgaagagaagtacccacaccagcagattgtgttagatattgaaccgcttgatcctgatgcagagaattatcatcaacgtgttagccgtctgcgtttttatcaaaagaatggatggcgtagaactcaccagatgttagttgatgcagatggtgaatttgaagccttagttgatcaaaatcactttgataagaacgactttgctaagacattgaagcaaatgagtctgggcttttaccgctttagaatagaaaaataataattgcagccactcagttatttgtagtgacccacaaaaattggacactttattaatattatgcaactaaggattgattccgatattgaatcggagtcagtccttttagtttactctttgttctttcgtaattatagaaatgaatataatctttaatcgcttgttctaattcattcagattggcatagtttgattctttgccataaaacatctctcttttaagtatgccaaagaagccttccataagcccatcgtctggagaacagcctttcctagacatactttgttcaatgccacgtcttgcaagttcatattgataagtcttatgttgatattgccagccacgatctgaatgaaatactaatccattcaatgaatcattaactttaaatgcatcatcaagcatagtcattacctgctgcaagttgggactacgagagatattataagcgacaatatctctcccacagccatcgataataggcgatagataaagcttttgtcctcttaagttgaattcagtaatatccgtgtaccacttcatatttggtctaatagcaaagaagttgcgtttaattaagttaggtttaattcttccttcaatttcaccctcaaagctgttgtagcgtcttctacgtttcatacgatatccaatcaaattaagtttacgcattaaacgatagactgtttttcgattgattataaagccttcactatgtaagtgatcagttattgttcgataacctggagcagtgtatctatctttaagttcaaagaatatttctttaattcgtttaattagactgtggtgccttatttcatcttgatcttcacgctttaggatatcgtaataattgcttctagataaaccaggtaaatcattatttagatcatttaaaatcgataagatagttttaacacccaacccaagttctagccttaattctctaacagcttgtgctatttctgttttggttggttttttctcttttgaaccaaggcattcaatttttttataaatgcgttctcgacagtaagctttaaattctggcgacgcaattcttcgttttctttcttcaatttctctagttctttgttcacgggttcgtcgtcctttcctcttgataacgacattatacccgttttctttataagagcgaatccaattaataagcatcccttgacttttcaagcccaattctaaagatacagagtaagcagcttcatgattgactaaaacccgattgatagcttctagtttaaattgggctgaataataagtatggggcttatctaatatatccattccatgcctatgaatgagtgaaactaagtacttaatactaactgagcctattccatactttttacttaaatatgtcgatcttttattttcaatagtccattctttataaatattcaatttatcttttttagttaatttagacatagtaaaacccccgaaatccgtgtccgaagttcgggggtcactacaattgagtggctgttttttatgaaaaagtataaaatagtataaaaaataattaacagtaataagttaaatttacgttgccatattttgctgattttgttgaagaatttggcgatatgtattagaaactaaaaaggcttgaaacaaagaggggattgtttcaagtctttttactagagaatattattttcaatgtaagtaagaacaccttgttcattgtttgatgttgttgtatgatctgcgaccttaaaaagcactggatttgcatttgacatagccatgccatcgccaacttctttaatcatttctaagtcattgccaccgtcaccgaaagcagtcatttcagaaagagggatatcaagtactttacctaattctgtcaacccatgtgccttatgaattcctggtaagataagatcaatatcaccatgaccactgcttgttacattacagtaatcgccaagactcttttttagaaaatcaacataataagctgtttttttatcaggacaagaaatagaaaattttagaactttgtcatcaatttcactaaagtcgtgtatcttctttaggcgatagtaatatttagtagaaatttcgtaataatcgtctgtgaattgaaccggaaagtaggcactctctactcctgatactaaaaattgcaattcggcttgctttaaaagaaaatcttcaatctttttaacgctttcttcagagaaagcatgcagagctaagatcttttcttgggttctaactaaggcgccattttctgcaacataaattacagtagggaagttcttaaaaaaagtagtaatttgataatattgattaccgctagcaactgtgaacataatatttcttttttctaattcttggtagatgttcgcaaatttttcttcatcatagcttttatcgtctcttaaaaaagtaccatccatatcaacggcaattagttttgtcatttaatagtctcctttaattgtgtgtctattagcaataatatattcaagtatatattgaaaatttgaacttattttttataattagttatgtaattcataaaagaggggaaaaatatgaataagagttcaaataattggcgtgtctttttaaagagcgtctggtttggtattattgctgggatgatttcaggaatggttaagattggttgggagaagatcttaccacctagaaccttggctcgcgatgttgttaatccgccgcaacacatgctgcaacaaatgggtgcttcttataagtttactcatacttatgtgatttacaatactgatcaaaaagttttctgggtagcattaattttgcactttagcttttcaattttctttgcttggctattgatctatatggttcagtttaagaaaactgcatgggctggactttgggaaggtgctttatatggaattattatttgggtagcatggcacttgattattatgccagttctcggtacaactccagcaccttggcaaatgccatttgcagaacacttttctgaattctttggtcatattgtatggggctggtcaattgctgcagttgggtactacttaattgccaagcaaaaagttaagaccttaactaatcaatattggtaaaatgattgatcgatctttcaactagaaagatcgattttttgttagaaaacaaacttatctaaagccttggcaataccgtcatcatcgtttgatgcagtaacaaagtctgcatgatcttttgcttcttgacttccgttgcccattgcaacagcagttcctacaatatcgaacattgaaatatcatttctttcatccccaaaagccatcatttcgtccgtactaacaccaatttttttacctaattcttttaaaccactccctttatttacgttgggatgtaaacattctaagaaatggtcatctgcacgaacgatatataaatcttgaccaaactttgctcttaatattggttcaaattgatcaagaagagctttatcgccaacaaaacaacctttcgaaatctgaaagtcattaggcatttcatcaggagttctaatgaacagtggagccgtattctcccaggcttgcagcaattcaaagtaatctacatcatgatctgcagtaataattcttgagtctgggtcaacaatgttaaaaggcactttttgctctttagcaaatttagtcagctctcggtaaagctcgttattgactaaatcttgcgtcattattttgccatccgcatttctagttattgcaccatttaaagtgacggcgtattgattgtcaccttcgattccaagctctttcatgaaatgtgcaagacctgcgattggtcgaccagagcaaagtacgaccttgattccctgatctaaagcttttttgattgcagctttagtagaagggagaattttattttctgaatttaaaagtgtaccgtctgtatctaaggcgattaatttaatcatttttatttcctcctcgtattttttgagaccgtaaaatagtttgtgtaaggatgaattattccttaatttaatttcctaaaacattagaaaaaggagttcctttctcgtatgattggtttgaacaaaaaaacatacagaaagaagaactccttcatgaatgattttaccaaaaatataactcaagctctattcaatcaagataaaattaatgatttgcttcgtcatgaaatccaacaagctgttaatgacatgttagaatctgaactgactgcctttttaggatatgatccctatgctagaaatggctggaatactggtaattctagaaatggtgcgtatttccgtaaaattgatacccagtttggatcaattgaggtacaagtgccacgagatcgcaatggtatgtttcatcaacacactctgccagactataaacaacatactgatctcttagaagatatggttataaagctttattctaaaggtgtaaccactagagaaatagctaatttgatcgaaaaaatgtatggcagtcattatagtccagctcaagtgtctaatatctctaagcaaatgattcctaaagttgaggcttatcacaagcgtaagctgagcgataagttcttttgtgtttatcttgatacaacgtatataccgttgcgtcgagaaacttttgaacgagaagcagtatatattgccattggcatcaagcctaatggtcacaaggaagttatcgactactgcattgcgcctagtgagaatattgaagtctggacggcgttgctccagaacatgaaatctcgtggtttaaagcaagtagagcttttcctttcagatggcgttgtcggcatgaaagcagcactggcaaagacctatcctcaagctcatttccaacgctgcttggtccatgttatgcgcaacatctgcgctaaagtacgcgtggacgatcgcgaggcaatcatgaacgaattcaagcagattcaccagcaagccaataaagcggctgctgttgatgtattgcatgctttttatgccaaatggaacaagagctacaatcgtgtcattagaaacctgaaagacatcgagccagacctgcttgttttttataattatcctaagcagatcagggcttcaatttactctaccaacatgatcgaatcctttaataacgtcattaagcgcaaggctaagcctaaagcggagttcccgactgaacagtcgcttgatacttttattggcatccaagcaatgagctacaatgaccgctacttcaaccgaattcacaaaggctttggtcaagtccaggataccttagaatcctattttgaataaataaaacgttaaaaaaacaatttacgagaaagatctatttacacaaaaaatttgacagtttcagttaaatcgttttagttaataaaaaagtcctactttcatagatagtacaactttatatatttgtactgtctactaaagtaggactatatcattcattccctcctggtcttctttttgtatgtttatcgtgtgttaatttacatgcgtttttagagtgtgaagagaacgctaaaatacctaatcccgcaccaccaactccaccacctgtacctcgaaaagcattaatgccgtttccgttaatgccactatttattgatttataatatgatgtggcttttacggaatttaatgcattttctgaccaaatgttattttgaacatttgatagagtaaaggaaacggtagtttgattgtctttagcaaagtattcatctgcgaacgctgttctggtggaactgaaaatgcttactaataatactgccgcgaggaaaactttaaatttaacaaattttttcatatataaaaactctttttattttttaatattattttctagtagatctaattatttaaaatttgttttggcaatggtacaaagctcaaacgaacgggtaactattaaaaagatacgggaaagactagatcgaccgagtaactttattgctaattatcgaagacgtttattagacgatcaaattatcaaagctacaagttatggagaagttgcatttactttgccattttttaaggaatatgtattgcaacaatatagatttgaacaagaaatggactactaaaaaagctagaatccgcagtacacggattctagctcttttcatatattcaactaattaaagtatttttgttctttttctttcttttcagcttctaatgctttttcactggcagctttcttaggtaagatccagttcattaacataccgaagattgtacataaagcaacagaagttaattggaaattaccaagttggaggtaggcaccaccaataccaataactaaaataactgaggcaattaacatattacgtttttcaccaaaatcaatcttatcatcaactaagatcttaagaccgttagatgcaatagttccgaataataggaaagaaataccaccaataactggcattggaattgattcgataactgcagcgactttaccaacaaaactaaagataattgcaaatacagcagctccagctaatacccagactgagtgaaccttagtcattgccaaaacaccaatattttcaccataagaagtggtaggtggaccaccgatgaaaccagcaataattgttgaaagaccatcccccatcattgttctatgaagaccaggattcttaaagaagtttctcttggttaaagagttaagaaccataatatgtcccatgtgttcagtcatagtaacaaaggcaattggagccatagttaaaatagctgcaggataccatttaaagtggtagctgattccaggtacatctaaagctggcattgagaaccaagcagcttttgctacacccgaaaagtcgacaatgcctaacacgcaagataaggcatagccacaaatgattcccagcataattgaaactagacttgtaaaacctttgaagcacatttggaaaattaaggtcataattagtgtaaaaattgcaactccaaagtaagtcaagttgtacttagtgcctttcatcatggcgtcattagcagcagtagttgctaacgataatccaattacgataataattggcccaactacgattggcggtaaaactttattaacccaatcagaaccaactttggcaatgactaaggctacgaccacgtatacaagaccagcagcgattgcaccttgagcaattgctggatagccatcttgtctcattaagacttgcatagtagcaacgaaggcaaaacttgaacctaagtatgctggaatcttgaaatgagtcagtaacatatgaacaagggtaccaacaccagatgataacagggcaatacttgggttaattccaactaagattggaactaggacggttgaaccaaacatggcaaacaagtgttgcattgaaagcaaaatgccttgtccaagttcaggcttctcataaacgtctaagatcgcatcattattatgaaatgtgtctttaggcatctttttcattttttcctccttgaaagtgacaattggatgacctaaagaaaaaacgactatctaaagaattacctctaagatagtcgtttctgtttaaaactatgcaaaaatagtttacgcgcagacttccttgatagcctcacaggactaaattaaaggtcatcacttatatttcttttttatttaactaagttatcggaaaaaagtcaagcgtgaaattttaactgttctaacttgtgagtttgaaagttcataaaaattttaaatattttatttgtaagcgatatcgttgctataatacgactcaggaggactatttggcaacttttgacgaaaatgaacataaattaactttgacaaacataaatgaacatatataataaagatgtaatgagttggttagccaaatagaattaaggtgaacaatgctaaaaagagaacgattaagaaatattttagaaattgtgactgatagaaggtttgtgaccgttgatgaattggctagggagctgcaagtttcagatatgacaattagacgggatctcaatgaattgaacacaactggtaaagtgatgcgaattcatggaggagcgcaagtgatttctcagcaagattcggttgaaaagaattatatgcaaaaaagagaaatcaacatttctgaaaaacaagcagccgctgaagttgcaagcaagattgttcaagatggcgaaacgatatatgttggaccaggaacaaccctagagtttatggttgctaagctaaatcaaagaaaattacggattgttactaattctttgcctgtttttgaaacagctaaaaagaatccaaataattatgaactaattttaattggtggagcatatcgtcgagttagtggagctttcattggggcactagcaaataatcagttaagagggatatcttttgatcgtggctttgttggcgtaaacggaattaaggacacctcaatgatgactgctaacttagaagaaggacagacgcaaggcttggggttgaatcgctcacgtaaaaagtatgttgtggctgattatcataagattaatcgcaatgacttttatgagttttaccacttatatgatgttgacggtttgattacaagtcctgggcttgatccggatatcgtaaagcattacagccaaatcacgactttatatcagggtagtgaatagcgaaaggagaacaacatgaaagttgttattggtagtgacaaaaaaggttttgaattaaaagaaaaagttaagaagtatctagaagatggcggctatgaagtcttagacgtaacgccagaaccagcagaagattttgtagaatctagcttaaaagttacgcatgaagtcttagaccatggtattaaaaaggctattatgtttgacgaatatggtgttggttcagcaatggcatcaaacaaagttaaaggcatggtaactgctgatgtcaacgaagaaagaactggacacatgactgctatgcacaacggggctaaagccttagcaattggtagtggcattgttggtgaaaagcttgccgaatcaatcattgattactacttgcatactgaatatgcgggcggacgtcaccaagttcgtttagacatgcttgaaaaaatgatttagaggaggcttgaaaatgtttgataatgatagaccacaaccagaatttgtagacccaaagattgataaacatactgttgttgcattaggtaatgaccacattgttacgccaattaaaatggcattatctgaccatttgaaagaggaaggataccaagtattagactttggtacttatgacaacactagaactcactacccaatgtatggtaagcgtgttgctgaagctgttgctgatggtagagctgatgttggtattgtaatgtgtggtactggtattggtatttcaactgctgctgataagaatgaaggcattcgcgccgcaatggttggcgatgttgctcaagctaagtatgctaaacgtgaattaaacgctaacgtcttaggtatgggtggtattgttttaggaagagacttcattttctacattgctgatgcatttttgaatgaaaagtatcaaccaactgaagaaaacaagaagttaattgaaaagatcgatagtattgctaaaccaaatcctgaccaaaaggacaatgaacacttctttgacgaagaaaataagaagtgggctgaaggtgtatatcacgattagttagaatggggtaataagatgagtaaattagaagaatttagaaaagcaaatccccaatacaagattttaactttggatgatccatcttttaaagaatacggtgtactctacactaatgactttaatttagatgatgtttataaggtaatggagaaagttccaattcctgaaactggcatgaaatatatcgctaatattcctgaactagctgatacttatacaatgttagctgtaaaacgcgatatttttggtgaaattccaattgatgctggtgttacattgggacactcagatacatttactgcatttgaatatcaccaatgttcagaagtaaacattatgcttgatgatgtcttaatggtgcttggtaagcgtgagactttggaagagaaacattttgttgatccaaatactgaagctagaatgttttacatgccaaaaggcactattgtagagctctacaatgatactctccactatgctccaattcagataactaagaagggctacaaggtaattgtggctgtaattcatggtactaacgctgttttgcctgaaggcgttaagagtctgaatccacgtgtagttaaatgtggaaagttccaagtcgttcacccttctcgtaaagataagattgaacaaggctatcaagttggcttaagcggggatgtaatcaaaacaactccccttgatgaataaataataaactacaatatttataaatttccctcaacttttattaatagaaacttatggagcatatagttatatgctccatttttttatgctaaaattagtttaaaattattttttgaaagcgcttgtaatttaacgaacaatattatatgataatggtgtagtaaatgaacaatatctaacatataaaaacaaaagtaaaagttcatttacacatactggaaaggtggttcatatgacagtggcaactagtttatttgctcctgacgcagtttttaccagtgacaagacaagtaaggaagaagtcctaaaagaggtctatggcaaattattaaaggctggctatgtaaaaggaaatttcctttcacatattattgaaagagaagagcattatccaactggaattgacacttcgccaatttcaaaagagttgccaaatgtcgcaattcctcatacagaaggcgaatttgtaaatgctcgtctgattgttccaatcgctttgaaacatccaattaagttccaaaatatgattgctccggatgaaagtttagaagttaaattcttatttatgattttaaacaatgatccggaaggacaagcaaatgtcctagcacagattatggggttcttatccacaacgccagttaaagatttaattaggctgtttaatctcacttcatctaaagaaatatttgattttatgagtgagaattttaagcaagaataggaagatattttttgggaggtatttattatggcaaaggaagttaagttattagctgcatgtggtgcaggggttaactcttctcaccaaattaaggatgctgttgaagaagaaatgaagaaacgtggacacaacgttcatgttgatgctgtgatgattaaggatgtaaacgaagatatgcttaatcactacgatgcatatttaaccattgctaagactgatttagcatttcaacctaagattcctttaattgaagcaggtccaattctttacagaattccagcaatggctcaacctgtttatgacaaggttgaagaagtagttaaaaaggtagaaaacgaatagcagttattcctgggggaatagaaaatgaacgcgataattgattttgcgaatgctatctttaagcctttaattgatatgggggcaccaacaatcatgctggttgttcttactattattgctctatgtttcagagttaaatttagtaaggctcttgaaggtggtatgaaattagccattgccttaacagcgatcggcgacattatgaatttattgactaccagttttgcaccagcgatgaatcaattcgttaagaatactggtatgcataaagatattatggatatgggatgggcaccacttgctactattacttggggttctccatataccttgtacttcttgttagttttaattatcttgaatgttttaatgttaatcttcaagagaactaacacactagatgttgatatctttgatgtttggcactcagcctttgttggtttgtttgcagtcttctgcggagcaccactttggttagcaactttattaattttacttattggttatttgaagatcgtcaactcagacttaatgaagccaacttttgacgacttgctagatgctccatcaagcaaccctatgactactactcacatgaactacatgatgaacccagtaatcatggtcttcaataagttctttgataagtgcttaccatggcttgataaatacgactttgactcagctaaattaaatgaaaagattggtttctggggcagtcgtttcgcaattggtgtttacttaggtatctttgtttcattacttgctggctacaactttacaactgaacaaggttggaagacaatgtttactctttccttcacagccggtgcatgtattgagttgttctcagttattggttcttggttcattgcttctgttgaaccattatcacaaggtatttcaaactttgctacttcaaaattcaagggacgtacattcaatgttggtcttgactggccattcatcgctggacgtgctgaaatttgggcagctgctaatgttttagctccaattatgatggttgaagctatggttattccaggtaacagattaatgcctttaggtggtattattgccatgggtgttactccagccttgttagttgtaactcgtggtaagattatcagaatgattatcattggtacgattgaattaccaatcttcctttgggcaggtactttagttgctccattcgtaactcaagtagcacaccaagttggtgctaatattccagctcacactttagtatctgatactactatggaaggtcctattgaaaaattcttaggttacttagtaggtaacgcttggaagcatcaaggaatgttcattgtttatgcaatcttagctattgctgcttacattttaatcttctggtggtactcaacagaaatgaagaaacgtaatgctaaatatgcagcagctgctaaggaagcatagttaaaatattatttagaaacgatagagatgatttttatgaagacaaagaaagttagccgcgaagaagaagcacgacgtaagcgagtattatattggacaatatttgtaattgcgattaatattccacaacttttctttaaaaatatttttattgaaggctttgcaatgattggtactatttatgccctttatcgcttggttgtattcgataataaaaagaatcgtctcagccgtaaatattatgactggaagggcagacctttagacgcaaagaataagaattaaaacagtttagaataagttattaaaaaagttaagatttatatttttagaaaaaccgcacgcaaaaagagattggaaatgaaaccaatccctttttatttaggaagaataaataataaaataaaaatgttctaataaaagcgcttacatttaaaagaataaatgctaacatacatgtgtaagcaaaaataaatgtggattgtaactaatacgattaggcaaaaccgcgaatttttaatacagatgactaactgtaatctcgtattgaaattcgtggttttttatttttcctggaggggtgaaagatggaataccgaatagtccaaatattaaacaataatgttgctattgttcataccaggaataataaacaaaacattgttatgggaaggggtgttgcttttcataagcaaaaaggagatttaattcaagaagaaaatgtcgacaaggtatttgaaataagagataagaataccgttaatgatttaacaactctgttatcaaacgtaccgctagattttgtcactacaagttatgacttaattgatcaagttcaagcaaaatatcattttgctgctgagccgtatatctacgtaactttaacaacgcacttgtttggcgcatatcaacgcttaataaatgacgaagatgatgttaattatttgccagacttaagtgataattatccagttgcttaccaaattgcggacgatgtaattaagggatttaaaagtagtttagatatttcttttccagagtcagaacataagagtatcgctcttcactttatcaatgctcatactagtggaagtggtgaggaagagaagagtcagaaggaaaatgatgaaatcatagaagttgttcagaatgagcttgaaagaaatggaatatatcgaacacaaaaaaatgccaatgattatgacagattgttagttcatttgaagtattttattaaccggcttaataatcatgagccagacagtttaccagtttctaaaggaatgattggagaaatagaagccagttattcaagagcctgggaaatagttcaaagaattaaagaattaatgcaagaaaaattacaaatagaattgtcattaagcgaacaaacatatttaacaattcatattcagagattaatttaaggagcttaaaaaatggatgcagaaaagcaaattactaaagaagaaatttcaatgactggtttttcaattgttgcttattcaggtgatgcaagaacttacttgatgcaggcaatggataaggcaagtgaaggaaaaatcactgaagcaaaggaacttgttaagaaggcagaagaatcaattaacttagctcataatgaacagactaagctcttgagtaaagaagctggaggagatgatatggatgtaaccttcattatggtccatggacaagatacattgatgaccacaatgcttttaaaggatcagatgaagacaattattaacctttatgaacgagtaaataagctcgaaggaaatagtattgaataagtagtttaaaaataaatgatttttaaacttaggatgaggaggaagaaaagatgaatggttttaccaaagcaatggataaaatgaagccaaaattcgaaaaaatagcggctaatccatatgtttcagcagttcgtgacggctttattgctgccatgccaattattttgttttcaagtttgtttacgctgattgcatatgtaccaaacgcgtggggattttattggccgaaggcagtagaaaacgcattggttttgccttatagctattcaatgggtttgcttgctttatatgtaactgcaacttgtgcgaagaatttaactgattataagaacttaaagctccctaagacaaaccagattaatccaatgaacgttatcttagctgctgaaatttcattcattattattgctattaaagttggtaaaaatggattagatttaacttacttaggtacgcaaggattaatcgcttcatatattgttggtttaatcgtacctaacatttactatgcatgtgttaagaacaatgtaactattaaaatgcctgatgttgtaccacaaaacattgctcaaacttttaaagacattttcccaatgactttctcagttgcattattctggatagttcaaattattttaaaccaactctttggtgcaaacttatcagaatgtgtagtaaaggttctttcaccattattccacgcaagtgatacttatggtggtttagcattagttgctggtgcgatggcattcttctggtttgttggtgtgcaaggtccttcaattgttgctccagccgtagccgcaattgaaactactaatgttggtttgaaccaacaattagttcatgccggaatgcaagcaagtcatgctttaactattaactgtcaagactacgttatgaacatgggtggtactggatcaactttcgtagttccattcatcttcttacttttagctaaatcagctcaaaacaaggctgctggtaaagctgcagttattcctggatgtttctcagttaacgaacctattttgtttggtgctccaattatcatgaacccagtattcttcattccatttttggtaacaccaatgttcaatgtctgtgcttataaattctttgttcaagttcttcacatgaacgctttatacaacactttaccttggactgttccagctccaattggtattatcgtatcttctggttttgctggtttatcatttgtttatgtaattttaactttagttgttgatactttaatttggattccattctttaagttctacgacaacgatttgtacaaacaagaacaagctaagcttgctgcagaacaagcttctggcgtagctactgctactgataattcaactgctagtcttgcagctactgacaaagaagctaaggaaggtattaccaaagatactaacgtaatggttatctgtgccggtggtggtacttcaggtatcttagctaaagctttaaacaagatggctaaagaacataacttgccacttcacgcagctgctcgtgcttatggtcaacacatggatattattcatgacatggacttgattattttggctccacagatggatagtatgaaggataacttgaaagaaattgccgatcatgatggttctaaattagttactactactggacgacagtacattgaattaactcaaaaaccagatttagcatttaagtttgttgttgatagccttgaaggcaagaatgaagataagtaattgaggtaaaaattaatgaaagaatttaaatttccaaaaggattttactttggcggggcaactgctgcttaccaatgtgaaggcgcaacaaaagaagatggtaaaggtgaagtaatctgggataagtatttgcgtgagcaaggaatgattaatcctgatcctgcttgtgatttttaccaccgttatccagaagacttagaattatgtaaaaagtttcacattaacgcaattagagtttcaattgactgggcaagaattttccctgaaggtgaaggaagaattgagccaagaggtgttgaatactaccacaagttatttaagaaatgtcatgaagaaggcgtagaaccctttgtaacgcttcatcactttgatacgccacaagccttgcaagacaagggcggctggctgtcacaagaaatgttagacgcttttgttgaatatgctaagttctgctttaaagaatatgctggcgaagttagatactggattacgattaatgaaccaacatcaatggctggtcaacaatatgttggtggaacattccctcctgcgtacaaggatcaatttgataagtgttttaaagctgaatataaccaaaatctagttcatgcccggattgttaatgcttataaagaagcaggctatactggccaaattggtattgttcatgctcttcaaactgtttatccagcaactgacagtgaaggcgataagcatgccgctgaattgaaagatgtattagaaaataagttttatcttgatggaacattagcaggtaagtattcaaagcatactcttgctttagtaaaagaaatcattgatgctaatggtcaacaaatgattgacatcaagccggaagacgaaaaagtacttcttaaagctgcaaaacaattagactttgttggagttaactattacttctcgaagtttatgaaagaatatcatggcgacaccgaaatcattcataacggtactggtgaaaagggaactgatgtcaaccgtatgaaaggcgtgggtgaagaaattcaccccaaggacttgccagcaactgattgggattggatcatttatccacaagggatgtatgatcaattgaagcgtgtttacgatgattatcctctagttcattcaatctatattaccgaaaacggaatgggttataaggataagtttgaaggcgaagataagatcatcgatgatacaccaagaattgattatctaaagcaacatatggaagaagtagctaaggcaattgaagctggtattccagttaatggttactttgtatggtcactgcaagatatgttctcttggacgaatggttattcaaagcgttatggtttattctatgtcgacttcaagacgcagaagcgttacgctaagaagagcgcatattggtataagaaactagctgaaactcgagaaattcctcctgttgattaaaaaatcatttaaagctaagtactgaatgaaagtacttagtttttttttgatggaaaagtttaaaagagtttaaaagtagatatgaagtttaaaagagtttaaaataaaatatgaagtttaaaagagtttaaaaatgaaaggagacatgaaagtgaataatccttttaatcccacatttggtgatgttcctaaaatatttcttgatacagatactagaattaatgatttaatttctaaaattaaaactagtgattttgctcgttcgttttttattactggcgttagaggttcagggaaaactgtttttctaaacgcagtagctcaaaaattggatcaagatgataattgttatcggattaaccttattaataaagataatctggtcgcaagtttaacaaagaaattggctatcaagactgaatctgcttttcaaaaagctctaaataatgttaattcaattactgtaaaaggaattaatattgatttaaacagttctgaaacagaatatgatattgttttagagaaaatactggaaaaagtaaagaaacaaaataaatacgttgttgttacaattgatgaaattactaataccgaagcagtaagagaatttgcacaagtctttaatgaattaaagggagataatttaccgatttttgttttaatgacgggtcttccagatttgattttagatatccaaactcaaagtaaattaacatttttgctgagatcagaaaaaattcacacattaccgctaaaaaatgcggatataattgctgcatatacatctgtatttaattgttctttaagtgttgcaagtcgaatggcaaaaatgacagggggatatgctttcgcctttcagttattggggtttttattgtttgatcaactaaacggaaaaattcctgaaagtgcagatcttgataaagtttcaatcccatttcaattgcaactatttgataatgcatatcagaaaatatttattgatttatctgaatgggatcgcaaatatttattagcagttaggggaaataagcgacttcaggatgtagtcaagatcttgggaaaagataaagtttttgtagcacaatatcgaagaagagctattgagcgtaagttgataattccagctgggtatggattagtacaatatacacttccatattttgatgaatatttaaaacagactgaagatcctgattcagcttattattggggatattagaaaaacagccaagcattcagtgcttagctgattttgtttaatttagatggaaccttcgaagaatatcaattccttgtctttgatatttattgggaataaaactttttctcattgcaatttgcatgtatgcccagagtttttgtcctgaacgtagacgaattatgtggagatctttttcatctttaacggaattctccattgctagagcaataccaacatttcttttaactaaatcgatcattagtttcattgttcgagccgtgtataaaatgtttggagtaaaatcgccgagctttgcctcttcttccaaacattctctagttaagtaacccttttgtctggccacaaacttgcggtttcttaattcttgggcatcaataacttttttatttttccaaggatcatctttaccagtaatgataactaactctgttctatctaaattacggataaaataggcaggatcattgattggcaccatccaagaatagatagcaacgtctacatcgccattgtttaaatctttaaatgcagttgcacttctttctaagcgagcatctaacaggttaacaatgtcttctttataaaatttttctataatttcaggaatataaatactaccagcaattccagaaaaggctactctaatttttttaatattggcgtgtttaacgtcgtaatcgatacttgccatttcttttaaaagatattttgctttttgataaagtaattcacctgcgggtgagagtgtaattttacttttgcgattcttttgaaaaatcaggggatcatcaaatctattttgaagtcgcttgatcgccatcgaaattgtcggttgtgtaacgttaaatgaattagcagttagggtatagttctgtgtttcaactaatttgcaaaaatatagtaaatccttgtcattcatattcttatctcttttataaatattttttatgaactaatcttttttaattataagttacatttttcacaattacaaggaagctatgatatatgcagttttacagagttgaatagcacaattttattcacaattacccactagaaaaagtttataaagagatataaattgctatgtgtaaaggatgaaacaagtttgtgaggagaagagcatatggtgtataagacgaaagtatcttgggatgccacatatgatgtaattgtaattggctttggtggcgccggagcaggtgcagcgcgttttgctgctgataataatgcaaaagttcttttgattgatgctgctcctgaaggaagcgaaggcggtaatactagatatgctggtggcgcgtttgcttggggatcaaattttgatcaactgaaagaatactataagcagacttattatccatttgagtatgatgaagaagcattagatacctttatcaaaaatgtaatgcaaatgaaggagtattcaaaaaagtattttggaattgaagctcaaccaacaggtagaagaccaaatggcgaatatccagaatataaagatgctgcttctatgcagtctcaaagtatgactaaagggatgtacaatggcggattttggaaattacttcgtaagcaagtttttgatcgactagacaaaattgatatttggtttgaatcgccagctgagcacttgattcaagatccagatactaacgctgtaattggtgctgttattaagcgaaataatagagaagtaaatgttgttgctaaaagaggagttgttttaagtctaggcggttttgaaaataatcaaagtatggttcaagactttttaggtcaaggttcgcttgcgccaattggtactttgtataaccgtggtaaggggattgatcttgctgttgaagcaggtgcgcgattatggcatatgtctaactacgattcacacggcttatcgcttagacaaaatgaaccacgagaaaaatttgcttacatgattaattggaagagcctatttaatgggtcaatttttgtagcaggtgatgatggaactcgttactttagagaagatgaagaagatcgtcatggctacaagtacaatcatggaaattgggttatgattcctaatcaaaatcatccacatatcattatggatcaagctcaatatgagcagctttctaacgatcagtcagctaaggcagatcaaattaaagaattgatttcatatgcaattaaagctgattcaattgaaaaattatctaaaaaaattgatgcgccatatttaaagcaggcagttgaagactttaatttcttaactgatgtgaaaaaacgagatatgtttttgaacagaaaaattgaaacaatgagatctttaaaagaaggtccatactatgcaattcctgttcgtcataatattttgcatacacatggtggtgcacagagaaattctaaatgtgaagtaattggacttgatggaaaggcaattcctaatttatatgaagccggagaattaggagacatttttgccactaagtatttaggggccaattcaattgctgatttattaatttcaggaaagattgctggaactaatgcagcaaaaataaagaataacatgactcttccagatgctgttactagcgcaagtcaagttcatgaagatttaaagagtgatgcacatcaagttaagatgcattttgaagctggtaaaaatcaaggaattgggtcaagcgatcaagggattaatgatcttccaattgttgttcgtgtaactttagatgaaaatcaaaacttaaagaatatcgaaacgcttcaagaaaaagaatctggcgatttgggtggtcaggcaataccaaaattgacccaagaaatgctcgaccataattctgctgacgtggactcagtttctggtgcaagtacaactagtagagcatttaaagatgctgttaaacaagcaatagagaatgctcgtaaaagcaaatagctttggttaggggagaagatatacaaatgttagcaaaagtaaattggaagggatttatacttccagtaattattggatgtgtattgtggatcattacaccttttagaccggctgcaataacaccaattgcatggcatttatttgccttatttattgccacaatcgtggcatgtattactaaaccattaccgatggttggttctactttggttgctgttacaattggtacgctacttcatatttttaatattaaagaagtatctgcatcttttgggaatacgactgtttggttaattgcaatgtgcttgttcatgtctgatggatttattagatcaggattgggtaaacgtgttgcttatctatttattaggtcttttggaaaaagaacaattggcttagcttattcactttcaacggttgaaaccttaatggcgattgccattccaagcaatattgcacgtgttaatggtattatgtatccaattattgacgccttatctagacaaatggggtcagatccaaaagaaggtacacaaagaaagttaggatcgtatttgatttttaacgagtacgaggtaaatattgtaacttcaactatgtttttaactggactagctggaaatatggttgctttaggtattgcaaaaacgcaaggaattactgtctcatggatgcaatggtttttagcagcaattgttccaggtctaatttctctaattttagtaccatttattttatataaaatttatccaccagaagttaaagaaacacctaatgctaatgcatgggcaagtaaaaagcttgaagaaatgggaaaaatgacgcctgctgaaaagattatggcttgcgtatttgttttggcattacttttatggttattaggatcaagtattggaattgatgcaactttagttggttttatcgcagtttcaattttgttaatttcaggtgtcattactgttaaagatatgatggatcaaaagggtgcttggagcttgattgtatggctatcaattgtaatgcttatgtcacagaaattaatgaaattaggatttttcccttggttctcaaaggaattaggtctaatgcttcatggcgttaactgggtttgggtcttagtaattctattcttggtttacttctatattcactatatgttcccatctattactacgcaaagttcagccgttttagcaggttttctatcaattgcacttggagctggtgttccaaagctaatggcgggattaatgctaggctttgcagggtcgatcttttgttcaacgactccttattcagctggaccagctgcacttctttcaactacaggatatgtaaaatcatcagattggtggaaattgtccgcaattttcggtgtctttttgaatattgtatggcttgggggcggtctgctttggactaaaataattggtttttggtaaaaaaataaaatatcagcggtgcatgttatcgctgatattttattttgtaatctcaaatatttcacctaatcaattgaatcatctatgcttaaagtgagagtgtgtttttcatagaaaagaaatagctatgattcaattagagcaattagttcagaaaaatttagctaaggaaaaagaaggtaaagttgcaagttatattcctgccttagcagaagttaaccctaagcaattaggagtagcgctttatgatttagatgacggcgaaattggtgaagctgggcaaagtgaagtgcgatttgcaattgagagtatttcaaaagtaattaccttgatgcttgctataaagaagatggggatccaagaagtatttaagcatgttggatctcgtcaaaccggttttgcctttaattcaattcttaatatggagattgaaaaggcaaaatatccactgaatccgtttattaacgccggcgctattgccacaacatcgatggtagtaagtaagaccggagaaggagcatttgaggaaatcttatcatttgcccgtgatatttgtaatgatcctaatctttatttagatcaaattatttatcattctgaaagacggactggtaatctcgaccggtcacttgcatattatatggaatctaaaaatatgatgcttggagatgtggtaactagccttgatacgtattttaagcagtgctcaatgatggttacagctcattctttggctaatttaggtgccgttttggcaaatggtggggtgaagccatgggataacaagcggattatttctgatgaagaggctagatgtgttaaatcgttgatgatgacaacgggtctttataatcaatcaggaacctattcgcgtttaattggcgtgccaactaagagtggggttggtggtggtttaatgtcagctgctccacataaatatggaattgggatttttagccctgcacttgataaggctggcaatagtgttgctggccttgatctattaagagatattgtcgaaggattagaattggatatttttgattagttaaaaattggatagaaaaaagctaagctactcgctattttttgcgggatgcttagcttttttattatgcggttaaaagaaattgtatgttctataatgaatcctgttgatggatatctatgatattctgcccatcaacaggatttgcaaaactgctttcttttaatatatgagctatatttaaaattcaatttctagtaaaatattatccaggttcaagtatagcaggtggcttctgctagaacttagtaactttagcatggctatacgcccctcaagcattttaagttacggaggtggaagctcatgcaaaattgggtggactggagagtcagattgatgagtgatatctttcgctattgcggtaagcattatcttaggtgctcttggtacatgtgccatagtgtcgcaaaagcttacgcaataataaaaaaagctaatcacaaggattagctaaactcaaaagtcatcttaagttacgattggagttagtgactcgcactcactagctccttttgttttataattatacactaaaaagttcatttatgatatgaaagcgtatgtaaaaatcatatatgataaattaagtggtaaaataataaaaaacattaatggaaataggagtaaaaatgaaaaaatattcaaaagcaatatattggggattaccaatcagtttaatccttgctatttcaattattttgcatttgggttggattaatgccttcgataatttctttgaaggattagttcatattgtgcctaatttgaaggggttaatgctaaaaattacttttttggccgatacaaaggttgatttggtttggatggttttaattgctgtaattctatggtttagaaaacatcgtccgcttgcaaccaacttagttttaacgatgattaccggagatgctgtgggttgggtaattaagcacttaatccaaagagcacgtccagtacaacacttagcagttgatgacggttttagttttccaagtggccataccttaggaatgggaatgattgtaatttggattataatggttcttttaccagttgttttaaaggatagaactaaacgtttttggattgattttcttttaattgtttggttagtcatcgtaatgatttctagagtatatgtatatgctcactatccatcagatgtttgtggctccgttgcaattgccttaacttgggttgctgttatgcaatttgtctttgagaaaattaaacaaacagtaaataaataattaaaaaaatagggtcaagtgtaacgcttaaccctatttgtgtgagcagttttatgattttggcggtttgtaggttatgaactaggcgtatttacttggccttaggcaaaaaatgagtagataaataggtagtattccgacactagggagagagtagaagaatcatccaaatgtttctggatctttattaagttctttatttggcaagatttcttacaacattgaagttaaataatattaagtttaagactacgattgctgccgtgacaataaataccatgctgtagctggagattccagcgataaaggaaccaagaagcggtccaacaatatttccaatatacattgcgctttgattccatgaaaaaattctacctgttacagcagctggagaatttttagtaagcaaagtttgtacttgaggaaaaaggcaagcgtcagtgaaaccaactaaaaaccttaaaatacctaactgaactgtattgtgaacaaaagcagttaaaaagaagagaattgttgcaacaataaaaccaccaataatgatcttgtgcgtaccaattctgtcgcccaaagcaccaaagcgagaagcagccaagaaagtagcaattccgggaagcgccgcgataattccagaaacaaagaccacattgccgtttccgttcattaattgcttaacataaagtgaaacaatcggattaattgagttattagcagcttggattattaaggttgttaagagtaagccaaaaattaaggcaggggagcgaagagttgcaatgacgccacttgctttatcgagcttcttttcagtaataggtttaaatccttcttcatgaacaaagaatagtgaaagcaggaaagagattaacaataaaccgcctgtaataaagaaagtgacgcggtaactaaatgcagaagcaagtgcacctcctaaaaatggtccaagcaagttgcctgcggtaaaggctgaagacatggttcctaaagcttgaccagacttttccttgggagtttctgtagcaattaaagcattcgagtttgatacaaaacccgcaaaaactccttgtagcattcttaggaaaaatagttgccagacgttagtaactaggcccatgcttccaagaacaattgccattcctagagaggctcgcaagatcattagttttctaccttttttatcagctaactttccccaccaaggagaaatgacagccgagacaaagtatactcctgaaaaaataaagccagaccagaagtttaattgctggtgagtaaaatgacctaaagtatcaatatataggggcaggaaaggcataatctctgaaaaagcgattcctgcaataaaaacagcaatcgaaagaacaaagagattctttttccaaatgggtttgtcagcttttttttgcatgctaatcctccaacttcttaaagtttacagtcttatttttcagagatatttttcctacttcaaaaccatagtcttttaattcctttttgtaagtcaaaaaagaatggtcaattggcagaccagcaatttcttgaatttgatcaaaagataattgaaaatcactatctttattgtttttgatatattcacagagtggattgaatttactcattttttggccttctttgaacttgtttttctaaattatttgatatttcttctagtttagttaaagtgtcagaatttaccgtgccgactaattgattaacttcttcaaaagcttgattaacttgatcaagaacatctttgccagctggtaaaagaaataattgcttctttaaaccgtttttgggatcaggacggcgttcaatcatctgctttttttctaataatttaactacattggtaaagctagcaggttgataaaagagatattcagcaacttctttttggatacaaccgggatgcttttgaatataacgtaaggcatgagcatgcgtcatccttaagttaattgaactcaatctttgattaattaaaagattttctagtttaccaatatgatatagaagattggctagtggtcgttttctcatagaattccttcttaaaaaagttgtaattacaactaatattaaaaacaattatagcgtaattaattgtaattacaactagttatcgattaattgttgggattagtgatttttgagaaatcatatttacgatattttattgcagctttttgatccttaaaaatagcactgtgaatatcgcctgatgaatatgctaagtagaggcagcgatgtcctttaaaagtacctgtaatataaataatatcaacagtatctaagaaaccacgtgcccgtaaccattgagaaccgtttttgtcttcaaaagataccattgttgtgtttccagcataggttttattgtctttttcagaacgatggctcaaatttaaattgggatctgttttttgatagaccacagaatccatgattgtatgtttggtaatgataaattttcgagcctgggtgctatagatatcagtttggtaccaagtaccttgaaagttgtctggaattgtagccagtttaaagcctggatattttttatttaagtttggcttaggagtagtggtcgtgctattttttgaagtagtgattgaggatttagaactggaagatttattttcattattattagatgaagtattgctgcaagcagtgagcaataaggttgaaaaaattactaagactagctttttcatgttttttacttccttaagatatgaatttttgctataagtatagcagagagataggaaaatctatgatatttttttaaccgcaaaacaaaaagcagacatctgggggaagagaagtctgcttttttaatgtcgtatgttattctgggagaataagtaaggtgtagaagttcccttacttgtctaatagaatacccttaattttttaaataaagctaggcataagatttaaaatttgcaaagaatttctttaaaaagtttaaagaagtaaaatataattaaaacaaaagtatttgcgagaggaaaaattatgaaaaaagaacaagaaattgagatgttaaaagaattctctgatgcaaattcaacctctggatttgaagaagaatttgtaaaattattttcgacttatgctaaagatacagcagatattactgttgatgggatgcttaatgtgtatgctgcaaagaaggaaaataagggagatcgtcctgtaattcaaatggatgcacactctgatgcggtaggctttatcacgcaagcagttagaccaaatgggttaatcaaattcgttccacttggtggctgggtaaaatataatattcctgcattaaaagtaaaaattaaaaatcgcgatggcgagtatattcccggtgtagttgctactaagccaccacatttcatgactgcagctgaaagaaattcaattccagaagtagctgacatgtcaattgatgttggctcatcaagtagagaagaaacaattaaagattacaaaattgatacgggttgcccaatttttgtagatgtaaaatgcgaatatcatgaaaaatcaggtcttttctttggtaaagattttgatgatcgttttggtgctggtgcaatgattggcgttttagataatttaaaaggtgaggaaactaattttgatgttgtagctgccttatcaagtcaagaagaagttggtcttcgcggagcatatgtgactggaagaaaaattaagcctgatttatgtatagtgcttgagagttgtccagcagacgatacttttgagccagagtggttatctcaaactggattgaagcgtggaccaatgttaagagatatggatacgacatttttaccgaatcctaaattccagcaatatgcttgtgatttagcagataaaaatggcattccatatactcgctcagtgagaactggtggaggacaagatggagccgcaatttactacgaatatggtgcgccaacaatcgtaattggaattccagtacgttatgaacattcaccatattgtttctctgcatataaagactttaaggcatcagtggatctagcaactgcgattattcgtgatatgacgaaagaaaagttagatagttttaagaaggtgatttaatggactggaaaagtttctttaagaaaatgacgattataatttggatgctatgtttgattaatttgttggtattaatagttcgttatactgcaagtgatattgggatgttcttttcgtgggattatccgctaatatgggcctttatactgggatgtattttttgcgttttggcaattttttggcctaagaaaaagaaataaagaaatgaaaaagtgaatgtgacgttactttaaaaccattttaaagtagagtttatgaaattatttgattgagtttaaaacgtttcaagaaatgcttgaattgaaaaatagccgttaaacgtaaatgttatctaaaggtataaatgacaaaaaataataccgatatatcgatactataaagtgttgatatatcggtatttttgtatataaaaatattttaatcttttattttctaaattatttttatagaaagcgcttgcaatttactaaaaacataatatacttaaattgtaacttgaaacgtttaaagttatgaaaagtgatattgttgaaacgtctgaattgaactatataagttgatttaaaacgtttaatttttacagggggattaaaaatgccaattacgttagcaagaattgatcaaagacttattcatggaattactgttaatcagtggaataaggttcttcatccaaaaagatttatggttattgatgatgaggttagccaaaacgaaatggtaaaggcaagtatgagaatgagtaagccaacaggaaccggcatgtctatcattaatgaagaaaaagcaataactaattttaaaaatggaaaatatgattctcattctgttttcttaattgttaaagaaccacattatattttggatttaatcaatgctggaatagaaatcccgaaagttaatgtaggagctttatttgaagaaggagatagaaaaccttacaccaagcgagtagctttagatgaaaaagaactagctgatttaaaggcaattgccgataaaggtattccagtatttttcgaatatactccagatgatgaaaatgaggtttcacttgcagaagtactaaaaaataaaggagagaattaatcatgcctatcatattacaaaacatcctgataattttacttgcagcttatatggcttgggataacggtacaggtaatcagattacaggtaactggccagttattattggtatgttagtcggtttaattatgggtaatctaagtgtaggtctagttattggtggtacgctccagcttatgtcgttaggtgttgcagctattggtggatcatcaatcccagaatatggtgttgcaactatagtcggtgtatttatcgctattcgaactggtgcttctacaggtactgcgatcgctgttggtctacccgtcggaatgctaactttgcaattagatgttgttatcaaaattattaataacttctttgctcattggtcacaacgtcttcttcatgaaaagaagtttaataaaatggatggagttttctatttaactatttttgtttggatgcttaaatacattattccaattgcattagtagtaatgtttggtacgccaattgttaaattaattcttcatgttattccagcatgggttacaaacggattaactattgctggtgggatgttaccagttgttggtattggaatgttattaagatatatgccagttaaaaagtatttagcatatttattagcaggttttgttttagcaggatatttaaaagttccaattttaggaattgctattttaggtttagcagcaacttatgaaatttatcgtattaattcagctaagaaagataaagaagaattacaaacagcaggaacagtagaagatgaaggagacgacttcgatgagtaaagaaatgaaccaacttgaaaatggtaaaaaattaactacccatgaacgcaaagatatgtttagacgctggatttttaatgctggcttaggttataactttgaaactcagcaagctccagcagtggctttttcaatgagaaaagctttaagaaaaatttatccaaacgatgatgaatatatcgaagcaatggataatcattacaagtatttcaatgctaatccattaatggccaatatcattttaggggctacactggccatggaagaaaaggatggaattaaagctaaagatgctgttcaatctttgaaaacttctttaatgggaccattttcaggtgttggtgactctgtcttttggattttaattccgactattatgggttcaattgctggttacatggcgcttcaaggtaatgcagttggtgcaattttatggatgctattgcagctttcattctattggttaaaaatgtggttctttaaaactggatacgattcaggtactaagttaatcacatcattaggtgaaaaaattaatatatttactgacgcaatttctgtcatgggattaatggtcgttgggtcactaattccaacagtagtaaaagtatatacaccattaaaatttagaaccgggaaagttatgctttctattcaaagtggtgttcttgacaaaattatgcctgctttacttccggttgctgtaactggtcttgtttattggctcttaggcagaaaaaagtggaccccaactaagattattttattgattattgttatttgtttagctggtgctgcaacaggcatcttaggcgttgcaaaatagataggaagaaaaatgagtaatattaaacgtcatattgtgattgcatcacattcaactctcgctgagggaatggccaatgctttaaaattttttgaaggtgacagtcttaaactgacagttttatctgcctacgttgataacaagccaatcgaaggacagattgaagaaatatttaatcaatttgataaaaatgatgaagttgttgttttaactgatttgttaggtggttctgtaaatcaaaaattcttcccatatattagtcgtccccatactcatgtaatcacgggtatgaatctatcattagcaatggcaattactatggaaccagttgatggttatttaacaagtgaaaagattcaatcaattgtttcagaagctcaaaatcaagtgaaatatgtgaatgaattagcggctgattcgagtgaggacgatgaagatgaatgattggaaaaagaaagctatagtctatgaggcatatgtacaaagttttaatgattcagatggtgatggaataggagatctacctggtttaattgaaaaactagattatataaagaatttgggtgccaatgtgatttggcttacgccaatttttaaatctcctctggtagataatggatatgacatagctgattatgaagctattaacccgatttatgggtcaatgaatgactttaaaaagttattgcagcaggctcatgaaagagatctgaaaattgtaatggatcttgttgttaaccacacttcagatcaacataagtggtttaaagaatctaaaaaaaatagaaataataaatactctgactattacatctggcgtgatccgaaagaagatggaagtgctcctacgaatttgggctcagcatttggcggatcggcttggacttatgtacctgagcgaaatcaatactatttgcatctttttgctaagcaacaaccagacttaaattgggataatcctcaagttcgcaatgacatttatcaaatgatgaaattctggttggatatgggtgtagacggatttagaatggattcgatcagtttcatttccaaaccaagtaaatttgaggatgcgcctttggaagataataaggaatatggtgcatattattatggctctgctaatggaccgcatattcatgaatatttacgtgaaatgaatcaaaaagttctaagtaaatatgatgtaatatcgattggagaaacaccgcataccactgctagagaagctcgactttttgttgaacccgatagacatgaattggatatggtatttcaatttgaacatatgcatgtagattatggtgaatttggtaggtattcagatgttacttttaagatgagtgatctccgtaattcaatgactagctggcaaaatgatttgtcatggaattcaaattatttgggtaatcacgatcaaccacgaattgtttctagatttggaaatgattcaaagtatagaaaagaatcggctaagatgcttgcaatggtatctttattgcaaaaaggaactccttttatttttcaaggtgaagaaattggaatgaccaatttgcatattaaaaatatagatgaattaaaagatctagaagctcataatatatacagtttcttaaaatctaaaggtatatctgataaagatgccttaaagatggttaatagaaaaacacgagataatgcccggactcctatgcaatggaataaggagcaaaatgctggtttttctagtggcaatccatggatagaagtaaatccaaattatttagaaattaacgtaaagaaagatttacaagattcaaattcaatttatcgtttttatcaaaagcttctaaaattaaggaataataatcaggtgttgcttgatggtaactatgatttaattacgcctgaagattcagcaatttttgcttatactaggagtagtgataaagataaagttgcggttatttgttcttttgtaccgtataaggttaaatatgaattacctgaagattttgtaaacaaaaataaagtgattttgtctaactatgacgatagagaagatatggcctcgaatacaatctatttaagaccgtatgaaggagttgtaattaaacgtgagtaacatgaaggacgtggcgcgtgaagctaatgtttcagtagcaacagtttcgaatttccttaatggaaagaaagtgcgcccaaaagctgcaaaagatattgatttagctataaaaaaattaaattatgtacgaaataatacggcaagatttttaaaaacgcaaagatcagcttttgtggttttcgttgtcccaagtgtatggtctccatttttttccgagttaactttttgggttcagaaatatttagataatcttggatataagatggtgctatgtgtatcagaaaatgattatcaaaaagaaaaaagctatgtaacaatggcagaagaacaacgagtagctggtattctttcaatttcatattctgatttaactagtcatgtacattctgatattcccctcgtttctattgaaaaagaaagtacaggtcaattttcactagtttcatcagataattatgaaggcggaaagatagcagctaaagaattaagtgaaagaaatattgataaatatatttttattggttctgcaaatcactcttctgtagaaatgaatgcgcgtaaagctggttttatagattattgtaataatcatgggctcaaatttgaaatagcggaagttgactctcgaaaaaatgataaaaagaaaattaagaatctgatagatgaaatttcaaataacggtaagaaatatggaatttttgctcatactgatgaaatcgcacttattttgacacaagaatttcaagatgctggtctaaagattccagaacatgtgcagataattggttttgatggttggaaactaacacctgatacacatttaactatttcatctattagacaaaatattgaagaaattgctaaaacagctgttgaacaattacataaggaaatggaagatccagatcatagagaaatttcacgattaatgatacctgtagcttttcgtgcaggtgatacgactgaaaataaatagaagaggtaaatatgtttaatactagaaatacccagttccttgattatttttatgaaggcgagcatttatgtatttacccatggggtcatggactaagagttcatgactctttttttgacgggatgcataattgggctcttacagagaaaagtgattttgattctaactttagggttatttacaatgctgatgaagctacgatagttaacggaaaaactaaagcaatcgttaataaaaatggaaaaattactttttatgataaaaataaaataattttagaagagttttggagggaacgaaattttagaaagataaaaattaataatagtcagtttttaaatcaaaaagaaaatgaatattcaagtgctttgaaaataaaagcaagagactttagtccgaataataaaggctcatatgaagttgcagtaagatttgaagcaaatgataatgagagaatatatggaatgggacaatatcagcagagtcaattaaatctgaaaggctgtaaattagagctagctcaaagaaactcacaagcaacagtcccatttttgatttctaattatgggtatggtttgttgtggaataacccaggaataggtgaagttacatttgcaaataacattacagagtggaaaaatatcgatactgattgtattgattattggatttgtgcagaggatacgccaaaagaaataatttctgcttatactaatgtaactggacattctcccaagatgccgcaatatgctttaggactttggcaaagtaagttgagatatagaaatcaaaatgaggttatttcggtagcaaagcattatcatgatttacatattccactatcggtaattgttattgattactttcattggccaaaacaaggtgactttaagttcgataaacgttatttccctaatccagaaaagatggtgaaagatttaaaaaggctaaatgttgaattaatggtttcagtttggccaaatattgattgtactagtgaaaactataatgaaatgaacgaaaagggatatttagttcgagtagataatgggaaaagtattacaatgacttttcatggtaatactaccttctttgatactactaaccctaaggcacgtcgatttgtttaggataaaataaaaagaaattattatcaaaaggaagttaagcatttttggttggatgaggcagaacctgaatattcgacctataattttgataattatcgattacatctaggtaggaattcccaagtcggaaacatctacccaaccttgtatgctaaaggattttatgaaggagaaaagaaagaagggcagcataaccctattagcctaattcgttcagcttgggcaggaagtcaaaaatatggctcacttgtttggagcggtgatattgattcaagttttcgctcatttaagtatcaatatcaggctggacttaatattggtttagctggaattccatggtggacaagcgatattggcggatttcatggtggaagttctaccgattctgagtttaaagaactattgattaggtggtttgaatttgcagtatattgtcctattttgagaatgcacggtgatagagagccccatgaatttccaattgataatcaagtggaaggcacaggtgctcctaacgaaatatggtcatttggaaaagaaacttttgacattttacgtaaacaagtaaatatccgagaagctcttaagccatacattaattcttgtatgaatgaagctcatgaaaaggggtttcctgtcatgagaactttattttttgaatttcctgaagataaggttagttggaatatagaagatgagcatatgttagggaaaaagtatttggtagccccgatttttgaattcggaaaacgaagaagacaagtttatttaccgtttggatcccgttggaaagatgttaacagtggctctattagaagtggcggaatatgggttaattgtgaggcatctttagatcaaattccggtttttgaaagaattgactactgaaaataacatatatagttctataccaatttgactacatattctaaataggtataaaattaacctttctgtgtgaataaaacacaaaagacagaaaggaataatttttgatgaataattcgacaacagagaagactttctttggtcagccacgtggcttgtctaccctgttcttcactgaaatgtgggagagatttagttactacggtatgcgtgctatcttactcttctacatgtactatgctgtagaacgtggcggtctaggcatggatgaaacaactgctgcttcaatcatgtctatttacggctcgctagtttttctttctacggtagctggtggctggctagcagatagaatttggggagcgagaagtaccgtcttctttggtggtgtcctgattatgatcgggcacattgttttagctttgccaatggcagagttaggtttatatatttcaattgcatttattgtaattggtactggattgcttaagccgaatgtttctaacatggtaggtggtctttactctttagatgatcgcagaagagatgctggtttcagtatttttgtgtttggaatcaaccttggatccgctttagctccctggcttgttccttgggcaagtgaaggctttggttttaacctgtttggtaatcatcttaacttccacgctggattttctttggcagcagtaggaatgttctttgccttagtacaatatgtatggggaggcaaaaagtatctttctgatgatggtatgcagccaactgatccaattgatcctgcaactcgtaataaattattgaagagagtgcttttaggtgttttggtcttagcagttgttttaggtgtgatggctgcgttaggtcaattaaacgttgacaatattattactttaattactattgtggctattgctttgccaatttactactttgttttaatgcttagaagtcctaaagtaaccaaggaagagcgctcaaaagtatgggcgtatattccattatttattgctgctgcgattttctggggaattgaagaatctggatcagttgttttagccttgtttgctgcgcaaagaacggttcttcatattggaaactggcactttactgctgctaacttccaaactttaaatccattatttattatgattttaaccccattttttgtttggctatgggataactggagaaaacagccgagcgctgctggcaagtttgcagctggtttagtctttgctggactttcatacatgtggatggcattgccaggtatgctctatggaacaaatgggcgagttagtccattctggttagttggttcatggttcattgttgaaattgctgagatgcttatttcgccaattggattatccgtaacaactcgcttggctcctaaggcattccgttctcaaatgatgagtctttggtttttagctgatgcaactggacaggctgttaattcgcagattgttaagtattactcaagtaaaactgaggtagcttatttcctaattgttggtttggtaagtgtcctgtttggtgttgtgatgtttttctttacaaaaaagattcacaatttgatggcggacgctgagtaattaagcaaaattgaatatttaaattaaaaagattcaagctttagcttgagtcttttttctgtaggcattgtaaattattaaaaaacgagtagaatgaattctgaagaaataattggatgacagagagcattcgttttggaggaattaaatatggatacaatggttaagcacagacatagtctaagcaaaaatcagaagtgggttattgcatctacttcttcaggttttgctcttgaaaatatggatgtgctttttttatcgtttgcaatgagttcaatgattgctgatcttcacttatcgggcggagcagcaggttttatttcgacaattactaaccttggaatgttagtgggcggaattgcttttggaattttaggggataaaattggccgtgttaagacttttagtcatacagtaattatttttgcgattgcgactgcattgatggcttttgctaataatatttatatgatctatggactacgtttcctagcaggaatcggagctggtggtgaatatggcgttggaattgctttaattgctgagaactttcataaagagcaaattggtaaaatgacatcagttgcagcaattggtggccaaattggcgcaattttagcagctttgattgcggcttggattataccaacggctggctggcatatgctatttctagtaggaattattccagtagttttaacaatttttattagaaagcatgttcatgaaagtgaacaatttcttgaagctaaagctagtgaaaagaattcattattgtcagatgtagcaaaaaaaatgttctctacgcctcgtcttgcttggcaaacactcggcttgatgattatgatgactgttcaaattgcgggctactttggcttaatgaactggttgccaactattgttcaaaaacaattaaatttaaatgtttcaaattctagcctttggatgattgcaactattattgggatgagtatcggaatgatgacttttggttcaatttttgattactttggtccgagaagagcttttgcaattttcttaatcggttctgccttgatggtctacactttgagtttggctcaaaatatggctactcttttagtaatcggtgctgttgtcggctttttctcaaacgggatgtttggcggttacggtgctgtgatcagtagattgtacccaactgaaattagatcaagtgccaacaacattattgttaatgtaggaagagcaattggtggtttttcatcagtagtaatcggtattttaatggatagatataatcttggtgtagtaatgggctttttgtcagccttatatattattagcttcattgtgatgattactttaccaggcttaaagaatttatcaaaagtagcaaaatagtatagcttttagcaatagtaaactagtgagaataaatatttttcaattaataattgtccttgtatactggagaaaaagtgtgagaggaaaaattatgaagaagagaaaaatttatcttactagtttttttattgctttatttttattatttttagcgggatgcagtcaaaagtcgcaagaagttcccgacaaaaaggttactgtgtcattgaataacactaaaacaattccgacttttttcttccacggctggggatccagcgtaaatgctgaaaagcatatggcaaatgcagctaaagaggctggcgcggctaatacaattgttcaagctgatgtaagtaaaaatggtactgttaagttgaatggaactattcctaaaaatgctaagagcccaattattgaggttaatttggaagacaatcaaagtggcaagacatcatacgtgaaagatgtgattactgccgtttcaaataaatatcattatgcaaaaatcaacctagttggacattcgatgggaaacttgcagattgctaattatattaatgaaaactacaacaataaaaaaattgccacagatcaataaagtagtttcaattgctggtcattacaatggctatttaggcgaagaagctggacaaaaagctaagatcaagaataaagaaactgggcaacctgatatttatagtgacggatttaagcaattattaccgttgcgtatgcactatccaaggcagatcgaagttttaaatatttatggtaataaggaagatggttcgaagtcagatgggtcggtttctgtagcttctgctcaaagttataaatatttaattaatggacgagcaaaatcatatcacgaggttgaaattaaaggaaaaaatgcacagcatagtaaattgcatgaaaatgaagaagttgatcatcttctaattgacctttttatggaaataaaaataaaaaatattgacaaatagtccctgtagatactaatatgattaaatgattagtatctacagggactatttttgcgaggcgaagcatggaattaagtgaaacagaaaaattaaattttgcgattattcgtggtagtaaggcttacgaagaatgggatagacaacaaggaatgccgaattatttaacaataattttgtatgaattgttgatgcgacaaaaattaactcaaaaagatttagttagcttaagcgacttacccaagcaatctattaataagggaatacatcgcttgttagaacagaattatttagaattgacaattgatccagatgataatcgcgtaaaatattgtcaattaactgcttctggtaaaaagtatgctaaagaaaaaatggcgtccttatttgaaatagaaaaggaagttgctcaaaaaatgggctcgaaaaagatgaagcaattggtagctctaaatgaagaatggagcgatactttttggaaatttttaagaaagaagggagaaaaataaatgcagattttgaagccacactttaaaaattatcgtaaagaaattatttttgcaattatcactattttggtttcagcttttgcaactttatggcaaccacgattgctagaaaatattcaaaaagcaatcttagctgataatcacgatactgttttaagagatgggattgggttagtagtacttggcttattagcgattattgctgggatttttaatgtatattatgctgcaaaaattgcccagggaataacttccgatttacgagaagaaacttatgctaaaattcagagcttttcattcggaaatattgagaagttttctagtgggtacgtttaattaatgatatgaaccaagttatgaacatgatgatgatcttattcatgcagctacttagaatgccaataattttacttggttcatttgtattaagtattgttaccattcctcattattggtgggcgccagtattgatgctcgctttaatgataggagttggattggttgttattcaaaatatgaaccaactgtttgccaagtttcaaaaatatatggataaaatttctactcaggtaaaagaaaacttgcaaggtgttcgtgtagtcaaatcttttaatcaaggtgaaaatgaaattaggagatttaacaaaacttctgatgatttgaatgaattaaacattaaaattggttattggatttctactattatgccagcatttatgctaattgcttatttagtcattgcattagtagtctttttagtaggccgcagtgctaatttaaatccaagtgatgtagctgttgtatcgccatatgtttcttatattttaactttgctctttgcaattttaattggtggctttgtgattatgaacttcacccgtgggatggtttctttgagaagaattaaggaagttcttgatactgagccagatgttcaatttgtttccaatgcttcagctgcaccaaaaaaaggaagtattgaatttgataatgtatcttttacttacccagatggtgataagccaactttaaaaaatatttccttcaaagtaaagccgggagagatggttggtattgttggcgcaactggatcaggtaagagtacgcttgctcaacttatcccgcgtttgtatgatccaactaaaggaacaatcaaaattggtggcaaagatttaaaaactattggtgaaaaagcccttcgtaatactgtttcaatggttttacaaaaagcaattttattctctggtacaattgcatccaacttacggcagggtaaagaagatgcaactgattatgaattgaagcgtgcttcagaaatcgcacaagcgcaagaatttgtaggacaatatcctgatgaattcgatcatgcagtagaagagcgttcagctaatttctctggtggtcaaaagcaacgtctatctattgctcgtggtgtaatcggccagccacctattttgattttagatgattcaacttctgccttagatgctaaatctgaaaaattggttcaggaagctttagaacatgatctaaaggatactacgacagtaattatcgctgaaaaaattgtgtcagtaatgaatgctgataaaattttagttttagatgatggaaaactcgttgccgaaggaactcacgaagagttattaaagatttctccaatttatcaagatatttatcgcacacaaaaagctaaagaaaagagaggtgaaattgatgagtaatactaaaaaagccttgagatactttgctaagtatctgaagaattactggaagggagttacgatagttgtagttctttccttggtttcaactttaagtcaggttttaggaccgcttttcctgggaaatgccgttcaagaattaactaaggctgtaagcaatgtagctagacgtagtcacgatttaagcagtttttatcagtctcttggctcaatggtcagtgtatatgcagcaggaattattgcttctttcattgcttggatggtaatgtctaaatttactgcgaatgctacaaatgatatgagagagaacttatttgctaagtttcagagaatgttaattcgatattttgatactcatcaagatggaaagctgttatctttatttaattcagatttagataatatttttaatgccttaaacaatgcaattttcgaaattatttctcaaggtgcattattaatcggaacgattattatgatgttcattgtcaatccgacaatggcttggtttacagtggcaacaaccccatttattttgataattagtttagttattatgaaaaaggcacggatttacctagataaacagcaagataaaatcagtgaccttaacggctatgttaatgaacagattaatggtgaaaaagttattattactaacggtttacaagaagaatcagttcaaagttttaaaaaatacaataacgatgtccgtaacgctatgtttaaggggcagttttattccggaatgcttttccccttattacagggaatttctttactaaacttagctattgtaattggtggaggcgcatggttaattgttagtggccaggtaagtagggcagttggcttaggattgattgtggcctttgttgaatattctcaaacatatttccaacctctaactcaattaacttctatttattctatgactcagctcgccttaactggtgcaagaagattagctactgttgaagagcaagatgaagaaaatactgtgccaaatggtaaagttttacagggaattaaaaaaggcgttaagctcgaaaatgttcattttggctataacgctgataaagaaattttgcatggtgtttcaattgacgttgataaaggaaaatctgttgctgtagttggtccaactggatcggggaaaacgactattatgaacttgattaatcgcttttacgatgttaatagtggaaaagtaacctttgatggcgttgatgtgcgtgatattacgcttgaatctttaagaaataatgtaggtattgttctacaagattcagtgctgtttactggaacagttgaagataatattaagtatggtaagccaactgctagtcgagaagaagtaattgcagcagcaaaagaagctaatattcacgactttatcatgaccctgcctgaaggctatgatacccatgtttcagaagaaaattcggtcttttctacaggtcagaaacaattaatttcgattgctagaactattttgactgatccagaatttttgattttggatgaagcgacttctaatgttgatacagttactgaagccaagattcaaaaggcaatggatgccgttattgcgggtagaacaagctttgttattgctcaccgtttgaagacaattctaaattcagataaaatagtagtattgaaagacggaaacgtcattgaagaaggaaaccacgacgagctacttaagaaacgtggattttactacggactatatactaatcaaatggcatttgaataatttagagggatcttttccctctaattttagttaggggaaaataaaaaaagtgaaaagaaagctacgaattttttctttatttactgtcttattgagcgtttttttactatcagcatgtcgaaaaaatacacgtaatgtataccaagaagttaaaagaagtaatgaaattacctggggcgttaaagctgatacacgtttattcggtttaatgagcattaaaactggaaagattgagggttttgaagttgatttagctaatgccttgaccaaagaaatgcttggaaaagatgctaaagccaattttgtacaaactactgccaaaactaagattccattattaaagaatggaaatattgatgcagttttagctgcaatgacaattacaccggagcgtaaaaagcagattgattttagtgaaccatacttttatgctggtcaatctttgttagttaaggaagactcaacaattaaaaatgttcaagatctaaatggaaaaacagcattagctgttaaaggtacaacagctgtcgctaatgttaaaaaatttgctccaaaagcaaaagtattagaatttgacgattatggtcaagcgttcactgcgctaaaagcaggtcagggtcaagcaatgacgactgataatggtttacttgctgggattgctactgaaaataagggctataagcttgttggtggtacatatacaaatgaaccatatggtattgcggtaaataagggacagaagcagatgaagaatgcaattaatcgtgctctcaataaattaaaaaaagatgggacgtataatgcattagtaaagaagtggtttagtggtattccaggctttaatattaaagaggctgaaggtgaaaaataaattttttacttgccttttttggaaaaatattattaaatgtaatcaacatttaaatttaaaaagcgatgaaaagaaaagtaaataatttatttcttttagtgagttaacgatagtggaaaagttagcagaccctggattattgaaagacacttttacaatgctgctggctgaaatcttagtgagagtaagttgagccgtaagcggtacgttatctagccgctggagcatgtttgtgctctagtcaagttggtctttaagtagacaatttaggtggtaccgcggaaaaaagcctttcgtcctgagaaatataggagcgaagggcttttttctttactccaaattagaaaaggagttatgtctgagtaggcaataggtaagctatattaaagttaattttaataattttagagtagaatggaaaagtgagtaaaaaagagaggggaagcacaatggctgcaattattgattttaagcatgtaaataagtactatggtaaattccatgctttaaaggatataaatttaagtattgaagagggtcaagttgtttcaattattggaccatctggttctggtaaaagtactttgattcggacaatgaatgggctagagcgaatcaattctggtactttgatggttactggctatgatctagcagataagcatacggatttaaacaaaattcgtaaaaatgtgggaatggttttccagcattttaacttgtatgacaaccatactgtgcttgaaaatataactttagctcctaagattgttttgcaccgtccagagaaagaaaaccacgatattgcaatggatcttttgaaaaaagtaggtcttgaagaaaaggctaatatgtatccaagacaattatctggtggacaaaagcaacgtgttgcaattgctcgttcgttagcaatgagaccaaaggctattttatttgatgaaccaactagtgcgcttgacccagaaatgattcaagatgttttagatgttatgaagtacgtagcagatcaaggaattacaatggttgttgtaactcatgaaatgggctttgctcgtgaggttggagatagacttattttctttgatcaaggaagaattttagaagatgctaagccagaagagttcttcgaacatcctaagactgaacgtgcgcgtcaatttttaagtaaggttattactgaaaagctaggtggctaaaatgaaaaaatcaattaagatttttattttacctttggtattagttttactgattactttaaccggatgtgccaaaaagcaaaaatcaagtaatatttatgaacaggttaaagaaagtaaaaccattacttggggcgttaaggctgatacgcgattatttggtttaatgagtattaaaactggaaaaatcgaaggctttgaagtggatttagcaaaagccttaactaaacaaatgttaggtaaaaatgcaaaaactgaatttgtgcaaactacgcctaagacgagaattccgctacttaagaatggtaacattgatgcaattttagcaacaatgacaattacacctgatcgtaaaaaacaagtaacttttagtgaaccatactttactgcaggtcaatctttactagttaaagataattcaactattaagaatgttaaggatcttaatggtaaaactgctttagcggtaaagggaacaacagcagttgataatgttaaaaaatttgcacctaaagcaaaagttttagagtatgacgattatggtcaagcttttactgccttaaaagcgggacaaggtcaagcaatgactactgataacggtttacttgccggaattgcgagtgaaaataaaggctataaattagtaggtggtacttataccagtgagccttacggaattgccgtagaaaaaggacaaactgattttgctgatcgtattaataaggcactaaatgaattaaagaaaaacggaacatatcatcgtttattagttaaatggttcaatggtattccaggatttaacattaaggaggttgaaaattcgtgatagggattttaacaaatcactggtctgaattcttatcaggcttttggaacacaatcttatgtagtctgattgccctgttctttagtttaattcttggggtaggctttgctttattagaagttgcaccaaataagtttggtagagcagtagcacatgtctatattgaaatttttcgtaatattcctttactagttattacaatgattttttaccttgttgtaccgcaaatttggtttaaggtatctggttttgcagctggtacaattggattaaccttgtatacttcagcttttattgcggaaactgttagggcaggaattaactcagttggagatgggcaaatggaaggagctcgttcaaatgggatgacttatacgcaagcaatgcgatatgttattttgccacaagctttaaagattgtaattcctctattgggcaatcaatttattaacttaattaaaaactcatcggtattagcctttgtagccggttttgacttgatgtatcaagcagatgtcatagctttttcatcttttgaaactattaatacctatgttgttgtaggtttattttacttaattttaaccttgccattaagttattacatgcgtcacttagaaaagaaattagcctaggaaggagaaaaagatggaaaactttattcatgcatattcttggattaacattcgctttctcttacaaggtttgtgggtgactatatatgtatccttaatatcaattgccttgagttttattctagggctagtatttggttttattcgatatgtgaagattaagtatctttcagctgttgttggttttgtgattgatattataagaaatttaccgctattgttgataatcttctttacgtactttggattgccagagttaggaattgttactaatccaacagtagcatcgattattgctctggtagtatttgaaggagccatgcttgctgaaattgtcagaagtggtattgctgctgtggatccgggacaaatggaaggagctcgttcaaacgggatgacctatatgcaggcgatgtatcatgtgatcattccgcaagctcttaataagatgatcccttctcttttgtcacaattcgtttcattagttaaagacacgtcacttgcaacaattattgttttgccagagttattgttccatgcgcaaattatttatagtcaaaatacaacctacttaattccaatgtatgtaattattgcaattatgtatttcattgtttgtttctcactctcaatgattgctaagcatttgcaaagtaagtattaattatgtgaaaaaccacgtgagctgaattcacgtggttttttgttgattaattattttttataaattgttttagttctttttgagagaagtatgaaccataatcttcagttaattgttttaaaatgaagtcattgctcgcattcaattttctactgaggttaatcatcttcttaatggtatcaattcgttcctcttcttttgcaacatatcgcatgtcgtcaagcttcatttggtaatccatgagttctttccttctttctggattagttttatatttctcaacatcgctttgtagcttttggataaagctatcatttgtattaattttaccacgcattagatcgaaaaatccttgcagacgcggcgtgatttttccttttgttccacttgcattaagtaaaattaatttttggccaatatttaatggatcatgtttaaatcctttggtgctccaagtagtattatagcgatattggtcaagcccaagcggatcggttggtagaattaaaattaaatacgtagtaggcaagttgcgataattttcaccttgcataaatagactttgatccatcattgaaaaataatattgcatccgctttcctaaaaaatcaggcagggtcatttgtagttcaatatcaaagactcggcctttgtcatctgtagcatagatgtcggggataataccatgcattgcaggatgaaacttcaatcttttctgtgtttcaaaactagcagtttgaatatgcaattcaggagcaattgctcgtaaaaggtcgcgacaattatttctttgttccataacccagctaaagattggatcagcggtgatatcagcttcatcaacccgtttttctaattcttttctgttcatagaaaactcctttaagtgtactagagaaagatctctaatcttaattacgcaaaagggagttttatttttttgaaaagaaaaagaagatcaatctgatcttcttaaattaaagtttgattgctaaagcttcataaggctttaattgcaaggctaaaggaagagaagcaagatttttatcgtaattttgaattaaaatatgccccgccttatttaaatattcagcaggtattttaacttcagtttctttgccatagaagtttgcaaatactaaaagtttttcattagagtcatctaaataacgttcataggccataacttgtgggtgttccattaaaaatggtttgatgtgaccttcagagatcaatttttctgattttctgagtttaattaatttttgatagaaattaaaaatttcaccatccagtagttctttttcaacgttaattctatcttggtctgttggcataagccaaggtttgtggtcactaaaaccagcatattgagaattatcccagtgcattggaacccttgaattatcgcgagctttagactgaacaatttcaaaagcttctttttcatcaataccttttttgattaatgcgtcataggcattcaaagcttcgatgtcaacataatccttcatggaagtatagtgaggatccatcataccaatttcttcgcccatataaatgtaaggcgttccgcgtagtagatgaagagcaagagctaacatctcagcagatttattgtgatattttccagtatcaccgaatcgatttaatgcccaaggctggtcgtgattattccagaatagagcttgccagccgccaccttgatcaatcttactattccaggtaagcataatatcttttaatttcttaaagtcaaaaggcatcttagaccatttttcaccgtttttatagtcaactttgaggtgatgaaaggtaaagaccattgaaagctcatgatcttctggacgggtataagcaattgaattttcaatcgtagttgatgacatttctccaacagtaactgattccgggtcttgaccgaaggattttgcatttaattcttttagatattgctgcaccactggtgtatcagtataaagggatttttcttgcaccggatctgttgagttaactaaggtagtatctttccctgtaacgttgattacgtcaaagcggaagccgtgaactcctttattacgccaaaagtttacaacatctattaaggcagcgcgaacttcaggattgtgccagtcaagatctgcttgagttgggtcgtagaggtggagatagtagtaatcagtgtcgccaaattttgaccaagctggaccaccaaattttgattgccagttattaggtagttgtccgtccttaccttttctaagataaaagaatttttgatacttcttatctccggctagagcttttttaaaccattcatgttctgttgagcagtgatttaaaaccatgtcgagcatcacattaacgttaatactttttaatttagttaccaattcttcgaaatcatccattgttccaaaacgaggatcaatttttttataatcagcaatgtcatagccgttgtcattttgtggagaaacaaaaaatgggttaaaccaaatgaaatctacatttagcttcttaatatagtcaattttttcaatgatgccacgtaagtcgccaataccatcattatttgagtcataaaaagattttgggtaaatttgataaattactttattgcctaaattattcatcgctaggatcctttctaaaatttaatcttttttcttcgagcaaaatcaacaaacttgaatttatcaggtcgatgatatgacagagttagttcaaatttagttgtatcagctaaataatttctgcttgcgaccagcactgcgagttcgttatctagttgaagtaaatctcgaattctttggttaactgtgcagacagaaatttctttcgttgcataggaaatttctaatttttctttattttctaaataattataaatagaagtttttgcagcatcttttggaagtgaattaataggaggtgaaagcaaatagtcgcaatctaagacatcagcttgtccttctattaatcgcaagcgttcaagatgaaaaccggcactgtttttttcttcaggaaaatatttgataaagccagtaggtaaatgttcttctttttgtaaaagtaaaacttttgtttccgccttaagtcctaattgattgttcaattcagcgaaactgctaattcctgaaataggaaaagcgtagcgatcaagatttaaaactattgagccttttccgcgaattttttgaattaagcctaagtcagttaagctagtaagtgctttgcgaattgtttctcttgaagccccatataagtccattaattgatgttcactagggagatattcgccaggtttatattgttgatgcttaattttatctactaagtcttgagcaatagcactaactttggattgagccataaaaaatcctcctttgtctttaattatatacacttgtttagacaagtaaagaaaaactttattatatacaaaatgcttatttaaaagaaaagtaagctttttcataaaatagtattgacaacttgtacagacaagtatagtatttaagtcaagattaatgaaagcggataccttcaaagaggagaatgaaattatggtacaagatactactaatttattagctccagctactggagcggttattgctttagctaagacttctgatccaatcttttctcagggaacaatgggagatggatttggattaactccaactgttggaaaggttgtagcacctgtctcaggaaaaattagtatggttgctgatactaagcatgctgtcggaatcgtcactaatgaaggactagaggtgctagttcacatgggcgttgatacagttggtttaaagggtgcaccattcacgattaagattgaaaatggtcaagaagttaaagctggcgatgaaattgctgaaatggatttagatgaaatcaaggctaagggattagatacaacaatcatggttttgattactaattcagctgataagatttcaggacttgatgtaactgaaggtgaggcagaagctggtgaggttgtcgcaacagcttacttaaaaacttcagaaacagaagacacttcaagtaaaaagttatcctatccagaattggctgctttcattattaaaaatgtcggcggtaaagataatgttaacaatgtaattcactgtattacccgtttgcgtttttatttaaaagatgaaagtaaagctaacgatgacgttttaaaaaatcaacgtggaattctagatgtgatgcatgcttctggccaataccaagttgtaattggtaatgaggtaactaatgtctttgatgaagtagtcaagcaattaggacctttagatagtgaagcagctcctgctccagaagatgacggtaaaaatccagtttcaaaagcttttggtaatttaattggatttatcactggttcaatgagtccaattatcggtgtaattgctgcagcaggtattattaaaggtattttggcattacttactctgcctcaattaggtagtttacttagtgtcaagagtacagcctatattactactagtgcaattgctgattcagccttctttttcttgccagtcttagttggttattgtgcagcaaagagattgaattccgatccaatcattgcagcagtaattggtggtgtgcttgtttaccctcaattagttgaatggggtaaagcttttaagacgatgtttgaagttggtgggattaagtttgagttcttgaactatacttactcaattttcccaatgattttagctgcatggcttgctaaaaagtgtgaagattggcttaaaaagtggctaccatcatacttgcaaatgatttttatcccattaattactgttttagttgtatctgcattgactttaatggtaactggtccgattattcaaggtgttgctaacgggattgctgtcttcattaactggttagttcacgcatctggttggatcggcggattcattattggtggattttaccaagtattggttatctttggtttgcactggggtgttgttccacttgttgcacaacaaattgccggaactggtgaaagtgcgttaaacgcaattatttgttcatcaatgattgctcaaggtgctgcagtattagctgttgctattaagtctaagaaagaagacttaaaagaattaggatttgcttcaactatttctgcaatgtgtggtgttactgagccagccgtttatggtatcagtttaagatataagaaagtatttatttctggttgtattggttctgcatttggtggccttgttactggattaatgcatggaacaatgtatggctttactggtggattaattggtttttcttcattctttaatccaaaacatccaactgatttatctagtttctatactttcttgattgctagtgctgtaacaattgtagtttcatttatcgtaacttgggtttggggctataacgatagtatggttcaaggcgccaaggttgcaaagaaaaagagacctggtagtaagtagaaatatttatttaaattaaataaacaataaaacaacgttggaagtttcagcgttgttttttgcgttcaggagttgcaaatattaaatcatattaatataattaataataatttaattaagtcgtagattagggggaaaggctatgatttttgaaaagcttttttctaaagaaaataaaaaagatgagatagttgatgttaagttaagtgataaaaagttcaatgaattaagaataaagttaagcattggagacgtaacagttgaacaaggcgagaatttttcggttaattttactggtaaaagacactacttaccgcttattcgcttagaagatggtaaactacgacttaagcaaaaaatgaatttgattgaaaagggagaagctcatttaaaagttgtgattcctacaaaggttactttggatagtcttgatattcaaactagtagcggggatattgagatagttgatattaagactgaaaaagcctatcttaaatctactgaaggtagagttagagtaagacgagtggcaatagctgagactcttcttgaatcaacagatggaaacgtaacagtacgaaatagtgatctagcagatggcaaactagcaacatacgatggagaaatcaaagtatcgggatctattttatctaggatttctttaaatgtaacagatggagatatgaatctaactgatgttacgattgacgaagggaatgcaaacttaaaggctggtaactttacgctcgatcatgctgtatttaagagcgattatgaaataaagaatattgaaggaaataatacagtttggagtgcaaatttaaaatatgctcatgtaagaacggcaaatggcttaaataatatttcgtttgatccacaaccttcaggtgttgttttaacaatgacaacggtagatggagataatgtagttgagtagaaaaaataaacctcgtggaataacccacgaggtttatttttacttgacgttgctcaaaacagaacgaatcttagttgtaagcatatcaatagcaacatcattttctccaccttctggaacgatgatgtccgcataacgcttagttggttcaataaattggttgtacattggcttaacggtctttaagtattgatcaataactgaatgaactgaacgaccacgttcttgcgtgtcacgttctaatcttctgataaaacgaatatcgtcatccgtatcaacaaagaccttgatgctcattaaattacgtaagttttcttcaccaagaacgagaataccttctaggataataatatcagctggttcagtgtgaatagtcttttcacttctagtatgagcagtaaagtcgtaaactggcatttcaactgccttatagtccattaattgacgaagttgctcaacaagtagtggcatgtcaaaggcatctggatgatcgtagttaatctttttacgctctgacattgataagtcatcgttattcttgtaataagaatcttgcgtcataattaaaatatggtcatcttgttgtaattggtcataaatttcatgggcaatggttgtcttcccactacctgaaccaccggcaattccaatgataatagggcgtttactttgcacaattaaaatctccttttttaaactattacaataataccttaaaattacgctctgtgatagatttacaggcaataatattgacaaatatgtgttttttctgaatatgtgaagtaaaataaaattgaaagtgttatgtatggttttaaaaagaaggttttactttgactgctcaagagaaagccgcaatcaagaattggaatccccgatatcggagaaatgtctatttatatctatggatttacggaattttaggtgcggtaactggaattactaatgatgcagctttgtcatactttgatatagtagcaccaggattaatttcaggtttgaatatctttaatgcaattactgcattattaatgtcgttgatgattgtttgggtacatgaattaggttatcgcaaaattttgttgattttgccgcctttaacttctatttttctggcgttgactactattacaactaaccaaatagttattatgtttgcttacattatttcatggactgcaattggagtttatgacttaatgtatcctctaatgtggacttcttatgttcctaaagaaattagaactaagatgtttacggtagtaatggttgtaaacttagttgcgcaaaccatcttaactttcattggtgggaaggcagtagtgtacttttttagcaagatgcagagtattccttatgatactgcttctaatctatctgctcatactgctcaactaagtggaagttatctagctaattatactaatgcctttagaatagtattgattttgactgctttagttaatgtagttgcttttgtattggcaatatttattaaagatgagccaaaggactatcgaaccgttgggatgaagaaaccgcaaacgccagaagagaagaagaaagcttttgaagccttaattaataaaaagacgattatgtggattctgtacattgcaggtattcaactaggtgcaagattggttgttccttatataccaatttatttgaatgattatctgcatattccccggggaattacttcaacgataaatacctttcagaccgcagcaatgtttattggatatttctttgctccattcttagcaaagaagttaggtgccattgtttctattgctgctgggaccttaacttgtgcaccattaatgttcttaatggctaatggtcggcattttggtactggaattactctttttgtagttgtaggagttttgctatttttacgtagtggtttagcaaatgcaacaatgccgattcagcaagaagtacagatgattattgtagataaggatatgcgtccagcatttactgctgtggttcagattgcatatgcggtaattggaataattgatggattatttacagccttttatttacttaagacgccagctgggtatgcgaatgcatactacattgcgactgctctatatgtagtagtaagtatcttattaattgtaatgtttgctaagcagtataactggatcttagatgagaaaaagagcaaatctaatgaaaaatagttaattgataacttaagaataataataaaataccgaattagtcgtgaaagtgactgattcggtatttttggtattttcggggggatgaaagatggtaatatttaagacataaaaataatgttgattatttaaggagaagaaatgatgaaagatattagaaaagaaaatattgttaaagctactactttgagtgaagaagaaatgattgaagttgttggtggaaaggcagtgaatggttttgttaatggaaattttagtagcagaatcagtctcttttgcacttttacaaaaaatgatagtaaaattaatgaataaatgataatatttggaaacaaaactactctttggaggacagaaatataaaaaatgaattgaaacaagtgttgaatgactttatctcacttgctaagactcgttatgataggaaaggcaacgaatacttactagagcaacttgaagttgccttagacaagttagaacataatgttcaagatgaagtagatgaagctcgtgcaacttatcaaaatataaatactatttgtcttactaaccatcttcacttggaaacagatgaataagcattacttgaaaagattaaaaaaatttcaatgagtaaaggctggcttggtggcttaaacagctggaatacgaccaatacttggcctggaaaataagagaaacataaatatcaaaaacaaaatctatccaagaatgaagaatagtcgaagggctattcttttttaatatattaactttatgtgcatattttttaaaagtgaactaaaatggatctgtaaaaaggaatagaagtgataactttgactaaaaatgatgaaaacgatgagataattaaggttgctcaattatctgttgaagatgcactgaaggaattaaatactagtcaaagtcgcttaacaattgatgaagttcatacactacagcaaaaatatggaaagaatatttttgccaaagcaaaccaggagccactttggaagaaatttttagctaattttactaatttaatggcgattctgctttgggtagcaggtattattgctttttgtgctgatttagtgcaattaggaattgctatttgggccgtaaatatcattaatggtatttttagtttttggcaagaatttcaagctgataaggcaactgaagcgctagcgaatatgcttccttcttatacaagagttgtaagaaacggaaaagaagaaaagattttagctaatgatttagtacccggcgatatcgttaagcttgaagaaggagacgatatcccagctgacattcgtgtaattgctgcaacaacggctcaagctgatcaatcttcgttgactggcgaagtgaacccagttcataagggtgctcatgctgttgaagacgcgaagaagaaaaatcacgctgatcttaataacatgattttctctggtaccaatatgatgaagggtaatgttactggagttgttgttaagacggggatgaatactgattttggtaagattgctgaattaacacaaaatgttgctcagcaaaagagtccgcttgaaaaagaactggatactttaactaagcagatttcaattttagccatttcaattgggattattttcttcttaattgctactttctttgttcactatcctttagtaaaaggctttgtctttgctctaggaatgattgtagcttttataccagaaggattagaaccaacagttactttatctttagctggggcggttcaacgaatggcaaaaaagcacgctctaattaagcgtttatctagcgtagaaacgttaggttcgacatcagtgatttgttctgataaaacaggaactttaactaagaatgaaatgacagttaaagaactttggaccctagaaaaaagctaccatgtttctggcgaaggctatgcagttcgaggccatattaaagaaggaccaacgcatgttttcgctaaagataatgacactttaaaagaagtattacttggtggagtttttgcagacaatgcaaaaattcaagcaccagataagaagcatctacgctatcaaatcttgggagatccaactgaagcatgccttgaagtggttgctcgaaaaggtaaagttgatgttgaagctgaattaaaaaatacgccgcgagttaaagaactaccatttgattcaagcagaaaaatgatgacggtaattcaaagctctgatggcacacaccgttttaatacctatactaagggtgctccgaactgtgtagttgataagtgtacttcttatttagaacacggtgagataaagcctattacccaggaaataaaagataagattatgcgagctaatgatggctatgcgaaggatggcctgcgtgttttagcagttgcaggacgtaatcttgatcaaaagatgatggataatttagattcagcaacaattgaaactgttgaaaaggatcttactttcttaggcttgacagtcatgatggatccaccaagagcagaagtgtataaagccgctcgtgaatgtcgcaaagctggaattaaggtaacgatggttaccggtgattatggcttaactgctaaaagtattgcacgccaaattggtttgaacgatccagataagcctttaactgtaattacaggggatgccttaaagacaatgccagatgatgaattaagacattatcttgaaggtgaggttgtctttgctcgaatggcacctgagcaaaaataccgtgtcgtttctatgtatgaaaaaatgggcaagattgttgctgctaccggtgacggtgttaatgatgctccagccttaaagaaagccaatattggaattgccatgggcggtactggtactgatgttgcaaaagaagcagccgatatgattttgactgatgataattttgcatctattgtcggagcaattaaagaaggacgcggagtctacagcaatattcgtaagtttttaatttacatcttaaactcaaatatgccagaagcagttccttcagttttgttcttgctttcaggtggtgcaattccgcttgctttaactgtaatggaaattctatttattgacttaggaacagatatgattccagctcttggattaggacgtgaagatcctgaaaaaggcatcatggatcgacctccacggtcgcctaaggatcacttaattaataagcatgttttagctaaagcatttttatggtatggcttaattgcttcaattattgcgacagcagcattctttggtgctaacttctatcgtggtcatatttttccaaatttaccagaggtaggttgagattatcgtcaagcaacgacagtaacgttggctgcaattatcttttgtcagattgcggcagtattaaatattcgttattcaagacaatcaatgtttaataagcatttcttcaagaattccatgatctttatcggaattattatggagatagttttgttgctatgcatttcttacgtgccagttttccagtcattctttggtacggagccacttaattcacatgattggattatgctagtatgtattccaattccgctaattttaattgatgagttaagaaagtggattttaaggaaaaattataaaaagtaaataaactttaactgctagttttaactagcagttttttcttgctaaaatattaaaaataaaggtggcgaaagtatgaaaaaaaggattggtaatggaaggcggagcgatgcgctgtatgttcaccgctggtgtgattgatactttaatgaaagaaaaaattaagtttgatggagcaattggtgtttcagctggagcagcatttggttgcaattataagtcaaggcaaataggacgtgtactgcgttataacatgaaatacgctagggatcctcgcttatcaagttggcagtcgtggctaaagacaggagacttatatggcgctgatttttgctaccgagaactaccagttaaattagatatctttgatacaagcgcttttcaaaaaaatccaatggatttttggtgtgtagcgactgacattgataatggagaagctgtatatcacaagttgttgtcaggtaaagaggctgatttaaaatggattcgtgcctcttcttctattccagtttttgcaaggccagtagagataggtaatcgaaagtattgggatggggggattagtgattcaatcccgattaaattttttgaaaaaattggctatcagaagaatattgtaattttgacgcaaccactatcttaccgaaaagaagtaagtaaactatatccagcattagagttagtcttgcacaagtatcctgctgtcttaagaaaattgaagactagggcaaaagattataatgatgtccttagttatattagaaaaaaagaagttcaaggcaagcttttagttatcaggcctccttatcatttggatattggtacgatggaaaaagatcctaaggaattgaaacgagtatacaatattggcgtaaaagaagctcaaaggaatctaaaagcgattcaatcgtatttaagcgaataatatttacttgtcttcattgcgtttcattcgctataattaacaaaagcttaaaattttggtttttaatttttaatagtaataattatagaaggaatgagcgtaatgaagaaaacaaaactatttagcttcttctttgcatttctactcttcttctcacttggtgccgcttttattcaaccagctcaagcagctagtgaaaaaaaggttgcagaaggcagcgttttaaagaagattaagaagagtggagagctagtagttggtacatctgccgactatccaccgttagagtttacagcaagtgaaaacggtaagactaaatatgttggagtcgatattgaattagctaaagacattgcacaagacttgggcgttaagcttgttattaagaatatgtcttttgactcgttgttagttgcacttgaaacaggaaaggcagacatggttatttctgctatgacacctactcctgaaagaaaacaaagtgtggctttttcaaaaatttactacaagccaagtggtgaatattttttagtaaataaaaaagataaggataaatatacaagcatccaaagccttaagggtcaagctattggtgcgcaaacaggaagcaaccaatataatttagttaaatcgcaaatgaaagattctaagttaaaaggccttgggaaaattaataacttggtcttagctttacaatctggtaaggtttcggcagttgtcgttgaagaattaatcgctaaagcttatgcggaaaacaataatagcttagccgcagtacgttcaaacttgaaagaaacacagtctggtaatgcagtagcaattgccaagggacaagatgaattagttgctcaggtgaataaaactattgatcatgttcaaaagaaagacttaattaataaacaatatcttccagcagctgccaaatatatgaaaacggaaaagaaaagtaatacttttgctaaatatattccatacttcttcaagggcatctggtacacaattgtaattactgtcttttctgtcattattggtattgttttaggaattattttagctttaatgcgcctgtctaagaatccaattttacactggcttgccgtttgctacattgaatttattcgtggtacgcctcaaatggttcaaattttgtttgtatactttggaatcggatatttaatttctaatctgtcagctttagttgctggtattatcgctatcggtcttaattctggagcttatgtggctgaggatattaggtcaggaatcgattctttgccaaaaggacaaatggaagcagcacgttccttaggcttaagtcgtcagaaagcatttagatatgtaattattcctcaggcaataaagaatatttggccagccttaggtaatgaatttattactttattgaaggatagttccttggtttcagtaattggagtagctgaattaatgtatcaaacacaattggttcagacttcaacttataagggtgtattaccattattcattgccatgattatttactttattatgactttctcattaacgagattgttgaatcattttgaaaagaggatgaagcgtaatgacagcaatgattaaggttgaacatttaaagaaaagttttggaaaaaaagaagtccttaaagatatttctgcaaatgttgataaaggaaaagttattagtatcattggtccatcaggttcaggaaagagtacttttttacgctgtctcaatgtgcttgaaacgccaactagtggcaagattgtttttgatggacaagatttaacgcatattaatgaaaaagagttagatattttacgtgaaaaaatgggaatggtttttcaaagttttaatctttttcctaatatgaatgtaattgaaaatatcaaacttgctccaatgaaggttaaaggggtaaatgaacaagatgctgagaagcaagctttagaattacttgataaggttggcttgaaagatcgggctgagcaatatccttcgagcctctctggcggtcaacaacagcgtgttgccattgctcgagctttagcaatggatccagaggtaatgctgtttgatgagccaacaagtgcattagatccagagatggtcggagaagttttaaagacaatgcaggatttagctgattcgggaatgacgatggttattgttactcacgaaatgggttttgctcgtgaagtttctgatgaagtttggtttatggcagatggatatttacaggaacagggtagtcctgagcaaatttttgaaaatccgcagagcccacgtgcacaagatttcctttctaaagttttataaacattaatatttcttttaaataagcactttctttttacaaggagagtgtttttctttataatggtttcttgacaaaaaagttggaaagggatgagtttaatgaagattagacaagctacaatgaataactatgatcaaatcatgtcgattttgaaagatggtgcaaaccaactagcggagcgcggagttgatcaatggcaaggagaatatccttctccagatcaaattaaagaagatattgacaaaggctttgcttatctggctgtttcagctgatggcgaaactgtaggtgccatttcaattgttgaagctccagatcattcctacgataatttaaagggtaaatggcttcttaatacagataagtatgtggtaattcatcgtgttgcgattcattcaaagcatgcgggccatggctatgccactaaattgttgactgaagtaattgattatattcgtgataatcgtaaagatattgatagtattcgtattgatactcatgagaataatactgcgatgcagcatttgattgataaaatgaattttagtaaagtaggagaactacatgggatttatcgtccagatgaaatttcatacgtttatgaaaatgtcagagaataaataactttttggctaggttgaaaaacctagccttttgtttagtttagtcgttctgttgacagagaatattatgataaaatattcttgttaaatactgtaaattacatggagaaattgatgagaacaaattttaaatttaaaatagctgctgttttaggactattagctattttaatcggacttacaggctgtgctaacaataatagcaataagattactgttgttggatctagtgccatgcagcttttagctgagcaagctggaaatgactatcgtctttctcatccagacagtaatattgttgtccaaggtggaggttctggtactggtcttagccaagtacaggctggcgctgttgaaatcggaacttctgatgtttttgctgaaacacaaaaaggaattgatgcaaaaaaattgcaaaatcatctagttgcagttgtagggattgtaccaatcgttaataagagcgctggcgtgaagaatttaaccagacagcaattgagtgatatttttattggtaagattaccaactggaaacaagttggtggtaaaaatcaaaatattactgtaattaatcgctctaaaggtagcggtacacgaggtacttttgaaggtttaattctaaacggaaagaaaccaattcaagcgcaagagcaagattctaacggtactgtacgtaagatcgttagttctacgccagggaccatttcttatatttctttcccttatgctaatgatgaaaatattcaaaaattgagtattgacggaataaagcctacaaataaaaatgtagcaacaaatcgttggcatctttggtcttatgagcatatgtatactaagggaaagcctaataaaaatgttcaaaaatttattgattatatgcttggcagtaaagttcagaatgacttagtacctaagttaggctacattagtatcaacaagatgcaagttgaacgtgatagtaataatcatgttgtgcaaaaataaagaataggacgttttgatggataacaaagatctaaaaaaagtagttgaatctgctttagataagcaaaaagttcctcatgttaaattaaagaagattggaactagcaaggttgatgttgctagtttaactgaaccttcaaaagagacgcgacaagaatattggggtaaggggttaacttactgtgctattatcctaattattattttagttgcttcaattatcggttttattggctttcatggtttagaaacatttaccaaagatcatgtaaatgtgttccaatttttgacctctagcgactgggatccgggtgaaggaaagagccatgtaggtgcagctgcaatgattataacttctttttcagttactttattagcagctttagtagcaaccccatttgccattgcggtggccttatttatgactgagtattcttctaaaaaaggagcacgctttttacaatctgtaattgaattattagttgggattccatctgttgtttacggatttttgggattaacaattattgttccatttattagaaatatttttggcggcacaggatttggtattttgtctgctactttggttttatttgtcatggtcttaccaacgattacttccttgactgttgacagtttaaaggccgttccttctgactaccgaaaggcttctttggctttgggagcaactaagtggcaaacaatttataaggtaattttacgagttgcttctcctagaattatgactgcggtaattttcggaatggcacgtgcctttggggaggcgttagccgtacaaatggttattggtaatgcagtcttgatgccagctaacttagtgagcccatcagctactttaactagtcaattaactagtcaaatgggaaatactgtgatgggaacgttgcctaataacgccctttggtcattagccctgttattattaattatgtctttagtctttaacttcttagtccgcttaattggaaagagaggacagaaataatgaatgcaaaaacgcgtaataaaattgctactgctggtatttataccttggtgagtattgtcgtaattattctttttggaattttgggcgatattttagtttctggtgtaccgcatctttcatggcattttttatcttctgaagcctcttcttatcaagctggtggcggagtacgagatcagctgtttaactctttgtatttgctagtcttgacactgattatttctttgccaattgcattaggcgctgggatttatttagcagaatatgctaaggataattggtttacaaacttaattaggacaaccattgagattttaagttctttaccatccattgttgtaggtttatttggttacttattatttgtagtgcaatttggttttggcttttccattatttctggtgcattggcactaacattttttaatctaccaactttgactagtaatattgaacaagctattgaaggtgttccacaagctcaaagagatgctggacttgctttaggcttatctaattggaagacgattcggggaattgttttaccagcagctttgccaggaattttgacaggtattattttaagtgctggtagaatttttggtgaagcagcagccttaatttatactgcaggtcaaagtggatcaacgattgattatagtaattggaatccgcttagcccaactagtttcttaaatgttatgcgcccagcagaaactttagctgttcatatttggaaagttaatacagaaggaatcattccggatgcaactattgtttcagctgcaacttctgctttattaattattgtggtaattttgtttaacctaggtgcacgtgctttaggtaaccatttataccgtaagttgacagctgctaagtcataaggagaaatttatgcaaaatgtgaatgaagcacctacttttattcatcaattcgatcaagatgaacaaattatttctactaaagatcttagtgtcttttatggtgggagtattcaaaagctttttggagctagcctgcaatttaagaaaaaaacgattactgccttaattggaggatctggatcaggaaagtcgacttttttacgttgtcttaatagaatgaatgataaggttgctcgagttgatggtgagatttggtatcacggcttagatattaataaaaacaatatcaatgtttaccaattaagaaagaatattgggatggtctttcaaaagccaaatccatttccaaaatcaattagagaaaatattacatatgctctcaaagcaaatggtgaaaaagataagcaaaagctggatcaaattgttgaagaaagcttaagagcagctgctttgtgggatgaagtaaaagataagctagataagagtgccttagcaatgtcaggtgggcagcagcagcgtttatgtatcgctagagcgcttgccttaaaacctgaaattttgcttctcgatgaaccagctagtgcgcttgatcctgtttctacttctaagcttgaagatacgctcaagcagttgagaaccgattatacaatgattatggttactcataatatgcaacaagctagtcgaatcagtgactatacagctttctttcatttaggacatgttctagagtacgataaaacagaaaatattttcactaatcctaagggtgaaattacggaagattatattcgcggaagttttggataaggggtttactgtggaaaatattattacaagtagagatgttcatctaagttatggaaatgttgaagccttgcatggaattagcttggattttgaagaaaaagagctaactgctttaattgggccttcggggtgtggaaagtcaactttcttgcgctgtttaaataggatgaatgatgatattccaaacattcatattagcggtgatattcagtttgaaggacaaaacatttatggttctaagatggatttggtagaattacgtaaagaagttgggatggtattccagcagccgagtccttttccattttctgtttatgacaatattgcttatggattaaagattgctggaattaaggataaagagttaattgatcagcgcgttgaagaaagtctcaagcaagcggcaatttggaaagaaaccaaagataatttagatcgcaatgctcaagctttttctggtggtcagcaacagagaatttgtattgcgcgtgctttagcagttcgtccgaaagtagttttgcttgatgaacccacaagtgcgcttgatccaatttcaagcagtgaaattgaggaaaccttgcttgaattaaagcatgaatatactttcatcatggtaacgcataacttgcagcaggccagtcgaatcagcgattacactgctttcttaatgagtggtgacttaattgaatatggaaaaacagctgatatgttcatgaatcctaagaaacagattacgagtgattatctgaatggacgttttggttaataaggagaagttttaagatgcatgaagtttttttagatgaattacgtaagttaaatacccgttttatggggatggggattgatgttagcgagtcaattgaggaagctacccaagcctttgttgatcatgataaaaaattagctcaaagcctggtaaaagatgatcaaaaagtttctcgggctgctactaaagttgagaagagaaccttgaagttaatggctctgcagcagccggttgctagtgattttagaaatgtaattagtatcttaaaggcaacgggagatttagaacgaattggtgaaaatgcactttcaattgcttgggagacaataagagtaaagggtaatccacgtattccagaagttgaagcaatcattaagtcaatgtctaagaaagttaacttcatgcttgatcaagttttaaaagcttatgttcaaggtgatgaaaaattagttcgggaagttgctaaaaaagatgacgaagtagatgaagattatgtaaaggcgcgtaagttgattattgctggaattaaacaagatccagaagccgctgttgcttcttcaagttactttatggtaattcgtttactggaacggattggagaccacgtagttaacttggcgcagtgggttgtttataagatgtcaggcgaattagttgacttaaatactaaagatactgatgaaatgactgaactataatcgaaaatatttagactaaaagactgcattttgcagtcttttttgtgcagataaatgtaagcgcgtgcaaattttcataaagaaatctataataaaactataaattaaactgtaaatgtgatcgggggaagttatgagtaatacagttcaaaaaaagaaaaagcatcaatttccaacagcgtatacggttattattatcgttctgttattggtgcagattttaacattttttatcccatcaggtaattatgcaacgcttgagtatgatcaacctaataaggaatttgtgattactaagccaaatggtagtaagcataaagaggcagcaactcaaaaaactttagataagtataaagttaagattgatgtgaagaagtttactaatggtactatttataagccagtggcaattcctgattcttatgaaaagattgatcagaaaaagccaggattaggtggagcaatttatcaatttttatcttcacaagtaaacggaattgcgcaaagtattgatattattgcctttgttttaattctgggtggatgtattggcgttgtgcacgcaaatggtgctattgatgccggtatgcaggcactttctaaaaagatcaagggtaagcaagtattactaatcgttttggtaatgggcttgattgccattggtggtacaacctttggtttagctgaagagaccatggctttttatccaattttgattcccgtattcttactggctggctttgatcgtatgacggttgtcgcgacgatcttcttaggaaccagtattggtacgatggcgtcgacgattaacccattttcaactgtaattgcttctaacactgctggtgttaacttcacagaggcattgccgttaagaatttgtatgtgggcaaattgcgttattgtggggatgatttatgttatcgcttatgccaaaaaggtacaaaagaaccccaaggcctcatatgtttataatgacttcgttaaagaagatcaagaatatctgaatcaagaccaaacaacgcaagaacaagaatttacttggcgtcaaaaattaacattgcttgttttcgcaattgcatttatcgtaatgatttggggtgttcagcaaaagggctggtactttactgaaattgcggttgtcttcttggcaactggatatatttttgcctttatttcaggcttgagcgagcacaagtttgttgaaagctttgtaaatggcgcaggcgacttattaggtgtggctttaacaattggattagcgcgtgccgtttcaattgtaatggaagaaagtcatactagcgataccatcatgaacttctttagccaacaagtctctggtatgccaccactagtgttcatttggtttatgttcttggtctacattgttttaggcttctttattcaatcatcttctggtttagccgttctctcaatgccaattatggcgccattagccaacgtagttggtattgaccgagcaagcattattgatgcttataactggggacagggctttatcagtttggtagctccaactggtttgattttaatgagcttaatgatggtgaatatcggctttaacaaatggtttaagttttgctggaaattattagtaattgagtttggtatttgtttagcatttttagcaattggtctggttgtttactgataaggcagataaatagcttttattaatttttatagttatgatttaaatatgaatattattttatttaaggaggcattttatggcttatccaaaaactaaaaaaattatgaatgaaatcgttgccgatttaactcaaacacatatggttgtgcatcaacatcattggtatatgctcggaagaggatttttgaaattacatccatatttagatgatgtaatggatgaattagctgagcaacaagatggagttgctgaaagattaattgagattaacggtagtccaatttcaacttatgaagaagtgttagaagaaactaacgttccagatcaagttggcagttgggatttatccatggaagaaagattccaattaattgtcaatgcatataagcaattacgagatgattatgaacgtggtattaagattagtgaagatgaaggagataattccactaatgacttgttaattgcttatcataccgccgttgaaaagagaatctggatgatgtcagctgaacttggcaagagacctggcgaaggtgaatagattttaaagaataaagaaggggcgaataaatttttgctccttttttatcatttattgttatgatttagaaaattataagttaaatatattctttataagtgatatagaaaatttaggtataacaatggatctatttaacaaccaacaagctagagatgctgcaattaaagccatgcatgaataccatttagcttacaaaacaggtaaaaatattgatacagcaaaagttaaacaatcactaaaaaagttatcccagtcagatagaacttttatgtttatcataggaaatacaagcaatcccttagttgcaattccatcgatcaattatgatataaagaagaatactctaaataaattaattatggcctacttttatttcaaaaaagaaaccgaaaacaaaatggataggcaaatattagtggtgcaggcagataacttttataaatcggttgccttaaataaataataaatgaacctttttgctataattaaaagaaaaagatcgtgcatgaaaggaaaaattgatgaataaagttacaattgttggatcaattaacgttgacaacattatgcatatcaaaaagcttcctcaaccaggagaaacaatagcaatgtccgaattttcaaaggcagctggtggtaaaggtgcaaaccaagcagtcgcaagtagtcgtgccaagaatgagacaatatttgttggccgtgttggggatgatgacaatggtcgctttatgcttgaacaatttaaggataatggcgttaatgttgaacatgtaacagtaactcctaatgagcaaactggtcaagcttatattttacttcaagaatctggtcaaaattcaattatcattcaacatggcgctaactttgatgtaacggctgcagatgttagaaatgctaagagtcaaattgaagatagcgattttgtgattgcacaatttgaaactccacttgaagcaactattgaagctttcaagattgctagagctgctggtaaaactactattttaaatcctgctcctgctcgtactgacattcccaaagaattgttagagctaaccgatttaattacacctaatgaaactgaagctgaaagcatcactggaattaaggttgatagcgaagaatcaatgaagaagagcagcgaactcttccacaagatgggaattaagggtgtaattatcacaattggtgagcgtggttcttacgtttcttatgaagatatcgaagaaattattccagcttttaaggttaaggcagttgatacaaccgctgctggtgatactttcttaggtgctttatctagtgaattaaaacctgatttaagtaacttaaaagaaagcgtagtttatgcttctaaatcttcttcatttactgtacagaaattaggtgcatttccatccattccgactagagatgtagttgagcaagctttaaaggagaattaaatatggataagagtgaacaagatcaattaaaaaaagaagcagctactaaagccgctatgatggtagaatctggttctgttttaggtgttggaaccggttcgacagttgcgttctttattgatgcattaggggaacgcaaagaaaaagagaattttagtcttaaacatattgttactacttctaaccgcagtaaaaagcaacttgaaggcctaggctttcaagttgatgaattagcggatattgatcaagctgatttgactgtagatggagcagatcgcgtcgatgataatttagatggaatcaaaggtggcggcggtgctttgactttagaaaagaatgtcgctattaactctaaaaaagtcatttggattgttgatgagtctaagcttgttcaccatttaagtggttttcctcttccagttgaagttctacctgtttctgcagaacaaaattttaagcgttttgaagaagaaggattaaagccgcaatggcgtcttgatgataacggcaaacgttatgtaacgcactatggaaattacattattgacttagcggctgatccaactcctgtaccacatggtttagcagattacttagatcatacagttggtgttgttgaacacgggttgttcttagatatgtgcgatgaagtgattattgctcatagcgatggtacgattgaagacaagaagagaaagtaaatatttttaaagaaaataatctaacttttaaagacttgactagttcaagtctttttttgtaacaaatcttagttcataataaatatgatacgtaaaatagaaagaaggacctttatgtcaaaaaagcccttaattattagtacagatccaggaatcgatgatgttgctgcaataacgattagtctttttgcagctgatcttgatgttaaaatgatcgtaccaacttggggcaatgtttccttagagcataccctacaaaatactcttgatttagaaaaatttttacatactgaagtgcctgtagtgaaaggtgctaatcaaccattggtacgtccagctattagcgctgcttcagttcacggtaagacaggaatcgctggttttgaatttgaaaaagcaaatagtgatttacttgaagaaggacttgctgctactaagatgtatgaagaaattaaaagcagtcctgaaaaagtaactcttttaggaatcgggccgttaactgactttgcgcttttatttaaacaatatcctgatgtagtagacaatattgctgaagtttacattatgggtggaaatattggccacggaaatcatagtccatttgcagaatataatattgctggagatccagaagctgctcaaattgtctttcattctgggttgccagtctatgttgctccactcgaggttggtgataaagcacatctaaccaaagatcaaatggataagattaaggaatgtggcgaagttggaaatatgctatattcaatgttctcaaatattcatgaacctgatggagatactagaattaagatttatgatccaactgccgtaggaattatgcttcatcctgaatttttcaccttaaaacctgcgaatgttgaaattgaattagctggacgttatacttatggcgctagcgtgatggactttttaagtgaagaacataatgcgcaaatcgcaaccgacgtcgatacaaagagctttgcaacttggtttgttcaaagtatccaagctgccaataacgggagaaaataatgactgatttagtctatcgctcagtgatgcgcgatattaaacaaaaaatacttaataatgaatatgaagatatgcgcttaccagatgagcggagtttaagtgactattatcatgtaagtcgttcatcaatgaaacgggctttgggattacttgcgcagcaagggatagtttttaaaaaaaggggtagtggaactttcattaatcctctttacttaaagaaccaagctctctttaaatatgaaggatcaaatttgggtattactgattcttttagcgttcctggtaagaaacaaagtattgagctattagactatcaagtaattaaggctgatgaagatttaagacaagatctctttttaaaagaatcagactttgtttatcaaattaaacgattgcgattattagatgatcaaccatttttgatcgaaactggttttattccaattaaaattacgccagaattaaatccagatattttaaagggatcgctatttaattatttagaagacacgcaaaataagacagtaacacgatcattcttaacaattactgttgaaccttcaactttagaagatcaatctaagttaatgctggctcctaatgaaccagttggcgtaatggaaggtattttctttttagatgatggaacgccatttgaagtttcgaatatgcggattcactataagtatatgaaatacaatacttttgttaacttaagtcaagaataaaaaataagacatcgtttttctcgggggatgagagaaacgatgtctttttgcttgaggggatagtttaatcaaattgcaaactatcattaattggtgccagatatacatagtttaagttagtatttttgcattgttcactgagagaattaattaaagcatcttgttccttagtgattggaatttgttttaacgctatttgagattgcaaaaacataactaatttattactccaagcaattgcgtcatcatgattttcagcttttgctataacctttaaaattgctttttcaagaggaagatatgcattaatctgtactttattaaaactagcatataagtcctttaacgttatgacaacttcattttgtttagtaatagtattttctaacatgataatgacctcgctgtcgtaaataactaatttatttctgggcccacttaaatactagcatcttgcttatttgaaaagcttattttgacagtaaatagcaacttttattaagtgtttatcttgatttaaataacgttatgctgatttatttcagtaaatggttccttaaatacagataaatccttaaaataaggctagaaatacagacaaatacataaaataagaggactttctgctaagattgatcttgtggggtgagaaaaatgcagtcacaaatagaaagattagatctaattcggcaaaaattagatgaaagaaaaacgattagtactcgtgaaattatgtcacgtttcttttgatacagcaagaagagacgtgattaagttaaccagcactggtcaagcaattagaattcacggcggattaatgaaaattaaacagggaacagttccagattataattctcgggcacatgtcttatctccgatcaaaaataaaatagctaagatgacagctaagtatttaaccgctaatcaattgatttatttaaacgcttcaactacgatttcgcagctttgtcgttatttaactggcttaaatgcaacgattatgactaattcaattgataacgctggagctttaatgatggataatttgcctaatgtgattttattaggtggatacttaaataaagaaaatcactatacttcttctttaaatagtttaaaagaaattgatcagtatgagtttgatgttgctgtaattggaacgtcatcagttaataaaaagggtgtatttgtagttaatcattctgatgctcagattgaaagagaagttgttaatcgaacaaagacagtcattttgctagcagaagaatataaatttaaggaagatcgttcttcaccatacaaggtaatggactgtaagcaggcagatattttaattacagataataaattagctcctcagtatcggaagtatttcaaaaagaatatcaaaattcgcgaagtattagcagaagaaagcaaaaactaagttttaaaaattggaccgtcccaataattttaaaagttgaatttttgcgtatgatgaattatgattaatactgtaataagcaatgaaaactatttcaaggagatacttgctatggtaataaattatgattctgaagaatacttaaagagcgtcgacgcatattggcgtgctgccaactacttatcagttggtcagctatttttaatgaataatccactattaaaaggcgaattaaaggctaaagatgtaaaacctaagccaattggacactggggcacaatcgttccacaaaactttatttatgctcatttaaatcgagcaattaaaaagtatgatttaaacatgttctatattgaaggttctggtcatggtggccaagtaatggtatctaactcatacttagatggctcatatactgagcgctatccagaaattactcaagatgaaaagggaatggctaagttgtttaagcaatttagttttccaggtggagttgcttctcatgctgcaccagaaacaccgggatcaatccatgaaggtggagagttaggttactcactttctcatggtgttggtgcaattttagataatcctgatgtaattgcagctgttgaaattggtgatggggaatccgaaactggcccacttgctacttcttggttctcaagcaagtttattaatccaattaaagatggtgctgtaattcctatcttacaaattaatggttttaagatttctaacccaactatcgtttcaagaatgagcgatgaagatttaactaaatattttgaaggaatgggctggaagccatactttgtttctgcatataaagatggcgaattcaatggttacaaggatcacatggaagttcaccacgagatggctaagacaatggatgaagttgttgaagaaattaaggctattcaaaagcatgctcgtgaaaataatgatgattcattagtgaaatggccaatgattgtctttagagtacctaagggctggactggacctaaatttgacttagatggtaatccaattgaaaatagtttccgtgctcaccaaattccaattccagtttctcaaggggatatgagtcataaggaaatgcttactgactggatggaaagctacaagccagaagaattattcaatgaggatggatcacctaaggagatcgttaaagaaaataccttgtcaggcgaccaaagaatggcgatgaatccagtaactaacggtggaattaatcctaaagttttaaatatgcctgattaccgtgattttgcagtgaaatttgataaacctggttctgttgagaagcaagatatggctgaatgggcaaaatacttagataagatggctgccttaaatccaactaatttccgcggttttggtccagatgaaactaaatctaatcgtttattccaacttttagataatcaaaaacgtcaatggatggaaaatattcatactccaaatgatgaaaacttggctcgcgaaggtcgcgtgattgattcgcaattatctgaacaccaagatgaaggatggcttgaaggttacgttttgacaggcagacatggcttttttgcaacttatgaagcatttggccgcgtagttgattcaatgcttacccaacacatgaagtggttaagaaaagcaaaagaacaaacttggcgtcatgattatccagctttgaacttagttgatacttcaactgttttccaacaagatcataacggttatactcaccaagatcctggtatgttaacccacctttatgaaaagaaccgtccagatttaattcatgaatacttaccagcagatactaactcacttcttgctgtatctgataaggcatttagagatcgtgaatgcattaacgttttagtaacttctaagcaacctcgtccgcaatggttctcgattgaagaagctaaaaagttagttgataaaggtcttggctacattgattgggcatcaactgataagggtgctaagccagatgttgtctttgcttccactggtactgaaccaacgattgagtcattagctgcaattgacttattgcacaaaaagtttccagacttaaagattcgctacattaatgttattgatgtcatgaaattaatgtctccagaaaagaatccaaatgcaatcagcaatgaagaattcgatcgtcttttccctaaaggtacaccagtcatctttgcttggcatggtttcaaaccaatgatggagtcaatttggtttgaccgtggacgcggaaaaaatgacgttcatattcatggctatgaagaaaatggtgatattactacgccatttgacatgcgagtattgaaccatatggatcgttatgatttagcaaaagatgttgtcgaaagtgtttccgacctaagtgaaaagaatgctgactttattgatgaaatggatagcttgcttgctaaacaccatcaatatattcgcgataatggtaaagatatgcctgaagttacagaatggcaatggaatggtttaaaataaaattgaataaatagtttttatagaaagacctaatggatgttaggtctttttttatggttaattagttattaaaatttgctctatcctaagtgcagcatagctgttataatgaatttatagaatataagtgtaattttattaatgaaatattgaagggatgattggatggaatttaaagatgtcttaacccgtgaacatgcaacaagaaaattcacggatcaaagagtaagtgaaaagaccgtacgtaaagttatcgaagaagcacaaagaacaccatctttacttaattcacagccttggcgtatttatgttgctgaaggtgaagtagcaaaaacaattcgaaaagaacacgaagaaaagaccttggctaatgaagaaccccatgaagaatttgattcattattaaacgttgaatgggatacatttccaagtaagaatatggcaacaatgagtgaaactttagactatttcttacgaggagaagctgatgactttgatcaagctcaacttaaattattcaatgctcctgtaattgtttttcttactattcctaaacaatctccagcttggtcaatctttgacttaggtggtttttcacaaactttaatgcttgcagcaaataatcgcggcttaagtacaatgccagcacatgcttttgttaagtatcctgaagtgatcagaaaatatttggatattccggaagatgaaacaattggaattggaattggcttaggatatcctaataaaaaagcaacaattaataattataagtctaagcgtgtaccactagatgaaatcttaaaaattaagaaaaatctttaatcatgatttcctgaagaattgagtgaatttactttaattcttcaggattttttgtactcacttatttaaaataaaattaaaatatggcataattataagaaatagtaaaaggaaatgaaaatgatgactttattagtttctccgcagcagtgggctaattgggatcagtggtataactacactttacctggctatattttaattttaggaactatctttttatttgttggcttaatcccatttttatgtgtaaaaaataaattaacagcagttttatttggggtaacgactacagttttgtgcctttttctaggtgcatcttattttaaaaataaagagtcaacggaatatatgaaggaaaatcattacttaactgcaatggtaagagtatacgatgcccaaatttttgctaaaaaatattatgatccaaatgaaattgaggcatttaaatatgtggcagatattaagacaccttctcatttgccttcgatttatcaaaaaattcctgttaaacaagaagttacttatcttggtaaaaatgactattatgcctttgttaaactggataatacagtaatgaaatttagtttagcagattgtaagaaggttcctggtaataaagcctactttactggatatcattttaagatgaaaaataaaaaatttttgaaattaggttttattgatttaaaacatgatttgcgcgataaggttgaattaccggcaaattcttataataagcaagtatcagagaatattgaagaaaattataatcatccaggattagttgcaaactggatccctgattcggagaaataatgctaaaatagagatgtaattatttaatatataaaaaaggtgaagatcacttgtctacaagtactataactactaatttaattgtcattttcataacgtttttaattgcgatattctttgttgttgccgaatttgctttagtgcaaactagatctagtcagctagaagatatgctagcaaacggtcaaggcaatcctaagaagttaaagcgtgctttgcacatggttcataacttaaatgaatcattatctactactcaggtgggtacgaccttagtcggtgttattttaggttggattggtcaaggaacaatcgaagaattattgactgatgtatttaagatgacgccatggtttggggcaaagactagcggtgtattaggagcaactttaggtgttgtattgttaacctacttagaagttgttgtaactgaaattgttcctaaaaatattgctatcgatatgcctgttaagtgtttgatggctgttgttactcccttgacagtctttcatacggtagtatatccatttgtttggttacttaaccatagcgctaatggcttacttcatttattgggaatgcaatcagctgatgaagaaagcgaagtttattcacaatctgaaattctacgtttatcacgtaatgctgtaactggtggatcacttgataaagacgatttgttatacatggagcgtgcctttgaattaaatgataaggttgctaaagatattatgactgatcgtactcagcttcaagttttgaatgccactgataatgttaaaactgctttaaagaagtatattgaggatggttttagtcgttttccagttgttcgtgataatgataaagacgatattgtcggttatgtttatgcttatgatattgtaagccaagatcaagaaaatcctgatgtcccgattactagaattattagagcgatcattactgtgcctgaatccatgttgattcaagatatcttgaagttaatgatcaaaaaacatactccaattgttctagtagtagatgaatatggtggcaccagcggtatcgtaacggataaagatatttatgaagagctctttggttcaattaaagatgaaattgatgatgtttctgatgaatatattgttcgtgatgatcatggggacattcatgtttcaggaaagactactttatacgattttgaacgttacttccatactaaacttaagagttttgaagacagcgatataattactatcggtggctatatgatggaacattaccctaacttgaagaagggtgaatctgttgacttagaaggctttaagttcaaattggtaaatatcgaacaaggtttcatgcgttggttccttgtttctaagatagccaggaacactgataagaaagcagcagatagcgatcaaaataaagaagaaaaagctaaataatcggtaaaaagcaccttaagatgggtgctttttttaataattaaatgttataattctactaataacaaagcatttataaaaggatatagagggttaagatgcaaaatagtgataatattgacaacattattgatcgtgttttattcagccaagatgatattgaagaaatttgtcaaagacttggcaaacaattgactgaagattacgctggaaagtttccattagtcattggcgtattaaagggtgcagtttatttcatgacggatttaactcggcacatgaatgtaaagatgcaaaatgatttcatggatgtttcaagctatggtgacggttttgagtcaagtggtaaagtcagattagatattgatgttcaagctgatgtcaaagatagagacgttttactagttgaggatattgttgatactggtcatactttgaagttcatgaaggatctattaaacaagcgtggtgccaaaagtgtaaaatgctgtgctttacttaataagactgaacgtcgtgaagataatgtagttgtagattactatggatcaaaagtggaaaatgagtttgttgttggttatggtttagactacttaaatgcatatcgtaatttaccttatgtcggcgttttaaagccagaagttattcaggcaaacttaaatcgttaatagttaaaatattactttaatagacaaacaaaaaagggttgaaagctactcacgagagatagtttcaaccctttatttataaattaattctgatgattatgtttcttcatatagtagtaaacaggtaatcccaaagctgttaaaccaattccagttattgaaagccagaattcattaattacggtactaattacaataaaaagaccaccgccgattgaaatgattggaataattgggtaccaaggaacaacatatggccgttctagtttaggctcacgatagcgtagaattaccaccgcaattgaaattaatgtcgtaaaggtccacataacaaataccaacatattagttaagagatcaaaagttcctaaaaaaatcattattaaggaaacggtcaaaataattaaagcactaattgtcggtacacccgtattaatgttagtgcgaccgattttattggaaaatggcaacattttatcttttgctagagtatatggaattctcattcctgtaagcataaagccattaattgctccataaacagaaattaaaattccgattgtaattaatttgcctccaagactaccaaagagctttaatgaggcaagataagcagtattttggttgccaattatttctttaaagggaattgcagttaagaaagcataatttactagcacataaattaaagtaattgaggatagtccaataataatggctcttgacaagttcttttctggttctttaacttccccagctagattggtgacattgatccagccgtcgtatgcaaataaagcagctagtaaaccgccacttaaaccagcccaaaaagaaatattatggccagaacttaagggaagtaagttgacattaattttagttgaattaaaaaggccaaaaattacaattaaggcaattggaatagccttcagaattgtcatagctgactgcattctggttgaaaatttggtagaaataaaatttaaactcattaaaaaaagagcgagcagtaaggcaataagggttgcatatttagtaggaaaaccaaataagacagcaaactgttgtccaaataccacgcttaaagcggcgatattggcaggaaagtagaccagcatttgtgcccagccaaataaaaagccccaaactttcccataagtatattcaatatatttaattgatccgccagtaactggaagtgcagcagcaatttcagaaactgttagaccagaagcaatagaaacgataccggctaaaatccaaacaaaaagagttaaagatggtgtgcctgtttcatgactaatgctaccgattttaaagaagacgcccccgccaattacagttcctaccactgtagccagcgcctgtccgaagctaatttgtcttttcaatatgtgctttcctttcaattcatttataacttttagtattgatatcattttatactaaatcttagtgaaagtggtatagaaaggagaagttcgttaaaataactagtggagggatgattgtgcatcgttatcgacataaatatacttttccaagtattattattttgctcattctagcattttctgggctagtatggggatatttcaatatgagacaaaatacgactgtgccacgtggctcaaatatgagtgtacttggaattgaattagatcaaactaaagattatattgaccttcataaattagaaaagaacggtatttcgtttgtttatttgcgttcaacgcaaggaaaatcgtattttgacgacaattatttactttaccgtgatcagcttcagggaactaatcttaattttggtacaattattgcctatagtgatgaaaccagcaatcaggatcagtatcaatattttgtaaataaagttggaactaatactggcagtttaccagttatgattgtgccagctactaatcacttaactaagtcatactggaaaagaatgggtgaatttgctcagatgataaataatcttggcaagagaacgatgatagcaggcgactaccgttatcataattactttccagaaggaacaagatttttatatacgggagaaagtttaaaagatagacgacattatgccttttggtgttacactcaaaatggaagagttaaaaatattgataatttagatcgagacgtcacaatgtttgcttacattggtactaatacgcaatatgcgcaactatatagtcaagagaaaacacaatagaggaagtaaaatgtattcaaaagcagtttcacaagttttagaaagagaacgcaaaactaaaccaactttaatccaagagcggacctatgatgcaatacgcaatggtgcgagtctggttgggctagctaagactggtacgggaaagactttggcatatggattgccagtaatggagcgaattgacgaaattggcggtcgaggagttattttagagccgacaactgaattagcaattcaaacgagaaataatcttttgccttatgctaaagctttaggacttaaaacagtcgcactagttggggccggcaatagaaaaagacaattagagcgtttaaaaaaagaaaagccagaaataattattgctactccgggaaggttttttgattttttatccgagaatcggattaaatatcaagatattaatgccttagtaattgatgaggcagatgatattttagaatttgcaaaattagatttattgagttccttaggacaaaatttatcctcaacagctcaaatattactttttggtgcttcagagtctgaagtaactaaaaatgcagaagatctttttaatcatacttttttattagttgatgtacggcctgagcaaaagtctgaagttaagcattatttcttgcaagtttcaaatgaatataaaatgcagtttttacaacggttagcgaaattagataagttcaagggtattctgttctttgacagtactgaaactgaaatgagattcgcacgaatttttagtcatagtaagactaaatttgctgttttaagtaatgaaactagtaagcaaaatcgcgaaaagttgcttagtgatttcaaagcggggcggattaagttcttatttgcgactgatttagctgcgcgtggcttagatttacctgatgttagttatgtcattaattttgaaataccaagtgaagttaatacttacttacatcgtagcggtagaactggacggatgaataaatcagggacagtcgttactcttggggatgaccatgactttagaaatttaaagaaattgctagctggtacttatcaaattgaaagagcatattttgctggttatagtttaactactgaaaaacctaagtctaaaaaggtagaggcagcaaaaaagaaagagcataaaaaagtagaaaaaagtaagccaaaacataaaaagaagcgttggcgtaataagaaaaataaagggtaccatcctcgaaagagcagaggagagaaataatgtcatctttagttaaatggcttgaaacttacgttttaccgcctgcatctcgtttagctcaagttcggtggctagttgcaatgcgggatactttcatttctttattaccgattacaatggctggttcaattgcgatgctatttaatagcatcattagagccgctaaagtacagatgcattgggatactttttattctttgatgcagccagttgtcgcaattgataatattatttgggaaggtacattcgcactttttgcagtttattttgcgatttcttggggctatcacttagctaagacctatgaagtaaatcgttttgctggctcagttgcttccttagttgcctttgcaatgagtattagtgattcagtaaaattacatattgatggagatgtagttgatattaaaaatgcttttgatatcaagcaattttcaacaatgggattatttacggctattatttttggttgcattgggactgccttgtttattgtattttataaggcaagaattcgactcaaagttgataccagtatgcctcatgctgaatgggtggcatttagtaccttaattccaattttactttcagtgtttattgttggctttgttaattatgcatttcaacggcttactggaacttattttggcaattggcttcttgcgactattcagcgtcccttggttaatttgggacagggatttggagtcgtcttattggttacctttctggtgcaaattttttggttctttggaattaacggcatcagtgttttaactccagtaatggactctttgtggttaaccccagaaaatattaacgttacagctgttcgaaacagtgagcgtgttccatatatttgggttcgcgattcatttaatgtatttgcttggtttggtggagcaggaggtaccctagtattaattattgcgatcttaatgttttctaaacgtaaagattatcgaacaatagctaagatggctgtagcacctggtatattcaatattaatgaacctattatttttggcttgcctgtagtttttaatccagtttatttaattccatttgttgttgctccgcttgtaaatgtgtcactagcatattgggcaacaacggcaggtctagttaatcaggttcaaatttttgttccaacagtaatgccgccacttattgggccgtttctagcatgtaattatgattggcgagctattgttttagcatttattaatatggtaatcgcacttcttatttggatgccgtttgtttttgcggctgacaagattgctaagcaagataataatcaacgtaatttctatttaccacagtattaaatttttaatagttaaaagtcagtttttatgttaaagtagaaactgattctgaccccgtagttcatctggatagaacaatggtctcctaaaccgtagaggtgagttcgaatctcaccggggtcataacaaaaaaggtatgtgcttcaattacaagaagtacataccctttttaatatcagacatattttaatggattgataaaaatttttaaaacaatccagagaaaaataattaataagactgcaataattccgattaaaaaataccttgtttttcgcggataggaatttcctaaaagaaaaaccagacaaaaaactataatggtaattaaaattgcagctaaagataaaaaactaaacataatgtatttcactttccttataatatataagtataaattagtttggctgatagtaccaaagaaaattgaattaggctatagtataagagacaagctaaaaggtaaggaaatatttatgaagaaaataaaagtaatgaccgtgtttggaactaggccagaggctattaagatggctcccttggtgttaaagttaaaacaagatgagcgttttgaagagataacagtagtaagtgcgcaacaccgtgaaatgcttgatcaggtgttagatatttttaagatcaaaccggattatgattttaatatcatgcataaaaaccaaactttggaagatattacttcaaaagtattgatggatatggcaaaagtaattaaaactgaacatccagatattgttttggttcatggtgatacaaccactagctttgcggctggtcttgcaactttttatgaacaaactactttaggtcatgttgaagcaggtctgagaacctggaataaatactcaccatttcctgaagaaatgaatcggcaaatgacagatgatttagcagatttgtattttgcaccaactgaattaagtaaaaagaatttaattaaggaaaaccatccaagtaacaatatttatgtaactggaaatacggcaattgatgcattagagcaaacagttaaaaaagattatcatcatgatgttcttgatgaaattacgccaggtaatagagtgattttggttactatgcaccgaagagaaaatcaaggtgaaccaatgcggcgcgtctttaaggtgatgaagcaggtagttgatagttatgatgatgtagaaatcatttacccagttcatctttcaccaagggtacaagcagtcgcaaaagaagtattaggtggcgaccctcgaattcatttgattaagccacttgatgtagttgattttcataatttagctaaaagaagttactttattatgactgattcaggtggtgtgcaagaagaagccccttctcttggcaaaccggtattagttttacgtgatacgactgaacgcccagagggtgttgaagcaggaaccctgaagcttgtaggtactgaggtagataaggttcatgatgaaatgattcgtttacttgaagataagaaagcctatgatgaaatggccaatgctaaaaatccttacggagatggtaaggcttcagatcgaattatgaatgcaattgcttattattttgataaagaacataatcaaaagccagcagattttagataaaaaaaagctccagaagttaatctggagcttttttcagtatttcttattaaaatgatctttaaaccttttagcaaacttactactagtattaagaaaaattgatttagtagttaagtagttaaaaatacctactaaaatttgatcgacaatttttacaaaaagagcattccagtgaagccaggaaataccaactaacataatcaagttatgaggaatcaaactgataattcggtaaataaagaataaacatagttggtagacaacgccgtgctgcttatcaacattttggataaatacgccatgtttattaaaagaaaaagaggctaaattagaaataatgaaggctatcgtgttagcataaattactggaattttccaaacattatgaaataaaagaaagcagacaatattaatgactgctgcaagaaaaccaaagataacataaacataaaagtttcggtgtctggcaacaagtctacctccaagctctcttaattgctcttgggtaattttttgcccctttcttttatgatgccttttagtcattaaatgcctcaactatttcttcagtagcttgatcgattaagtcgatatcctcatcgtcaacagcattttcaattttaactggtttagctacttcaactgcaccgcatttaataaatgctttttcgaaatcatctacattttcgcaatagtgatctttatatgttttgtctcctgaacccataacagcaaattttttgccagaaaggtcaagcgtaattagttgatcataaaagtcttttaattcatcagtcataacgccttcgccgtatgtataagtaaccattacgcaaaggtcagcatcaagataagaagtagcatctgcaaagctgacgtcgatattttcaacgtcaaaacctgcatcttgtaaattctcttctaaaatctccgccatatcttcatcattaccagtcatactggcaaagacaatctgtgctttcatgcaaaaaacttctttctataacgttttcttttattatactaaagaagtatagaagtttgtaaatcttaagagaaattatttaagaaaagctttataatgaatatctggaattttctcaataactactaaattatacttatttaaggtatgctaggagtatataaattaaaaaggagattttttaatgataacaattaagtcaaaacgcgaattgcaaggaatgcaaaaatctggtcgcgttttagcagcaatgtttgaaggtttacgtgacgtgattaaacctggaatttctacttgggaaattgaagaatttgcacaggattttatgaaaaaacatggtggtcgtctttcagaacaaggctttgaaggatataagtatggtacttgtattagtgtcaatgacgaaattgcgcatgcaattcctcgaaaagataagatcttaaaagaaggcgacttagttagtgttgacgtaacttgtaacgtcgatggctatgaaactgactcatgcactacttatggtgttggcgaaatttctgctgaagatcaaaaattaatggatgttactaaaaaagcaatgtacatgggaattgaccaagctgttgtgggtaatcgtattggtgacattggtagcgttattcaaaattacgttgagaatgaaaatggttatggtgatgtacgagaacttgtaggccacggaattcaaccatctattcacgaagatccagaagttcctcactggggtaaggcaggtcacggtttacgtttgcgtgaaggaatgactattacagttgaaccaatggttgaagcaggtggggactggagaattgaacaaaagactgtttcagatccaaacgatgactgggtatactacgcaactccagatggatcaaaagcagcacaatttgagcatacttttgctatcactccagatggtccaaagatcttaactttacaaaagccatatgatggttatgaaaagtatcttcctcactttttagatgaagattaataagtagtaaagtttatgaaatcttttctcaatcagactaaaaaccgtataacagaattttttcaattattatctaaatatattagccaaggcgagataaatcagacttcgattattatcgcttattatgtactgcttagtattttcccaattatcattattattggaaatgtcttgcccttatttagtattgatacaaaaccgattgctcgctaccttgaattaatttttccatcacaagtttcaagtttgattatgcccattattaatgctttattgaaaaagcattcaagtggctttatttctttgggtattgtgattgcaatttggtctttaagttgtttagtgaactcagttcgtttagctgcaaataaaatttatggcgttgataaaaaagaaaaaggaaagtcatggtggaactatttacttgctaggacattcacctttgcactttctgtaattttagtggctggcttttccatcataatctttgtatttacctttggtagacagattatggaatttctagctccaatttttaatctatcgttatggtgggtatataaattggaaaattatcgctggccaattatcattttaatgacagttattatcaacttgtatattaactatgttattccaaatatcagcgttcaaaagcgggtagtatggcccggggtttgtttcactgtagctagctggggtgccttgtcttatttctttggtttgtatttaagacagtttggaacgcgctggcaaaattatggaattgtcggttcatttataatttttatgttatggcttaatataggttcattcttacttttgttaggtatttgtattaatgctacaggggatgaactaaaagatagaaaaattgaatacagtcgtagcccgattttgagaatttttagaaaaaataagaaattacctaaataagttatcttaagtttggtaaaatacattatggaaagcttatttttgtgaggagaataaaatgaaagtaagaaaagcagttattccagcagctggattaggtactagatttttacctgcaactaaggctatgcctaaggaaatggtaccaattgttgataaaccaacaattcaatttatcgtagaagaagctaaaaaatcaggaattgaagatatcttgattgttactggtaagaacaagcgctcaattgaagatcactttgacgctaacccagaactagaacaagatttggaagaaaagggtaagactgaacttttacacttgacccaatcaattactaatttaggtgttaacctttactacactcgtcaaccacatccagctggtttaggagatgcgattttaagagctcgcagcttcgttggggatgaaccatttgctgttatgcttggtgacgacttaatggacgacaaggttccactaactaagcaattaattgatcgctacgataagacacatgcatcaactattgctgttatgcctgtaccacatgaagaagtttctaagtacggtgttatcgatccagataacgaaattgaaccaggcttgattaacgttaaagcctttgttgaaaagccagatgttgataaagctcctagtgattacgcaatcattggtcgttacttattaactccagaaatttttgatattttagcacatcaaaaacctggtcgtggtggcgaaattcaattaactgacgctattgatactatgaacaagactcaacgagtatttgctcatgtatttagcggtgaacgtcacgatgttggtaacaaggaaggttaccttgaaacctcaattgaatatggtttatctcacccacaaattaaagatgatttacgtaagtacatcattgcaatgggtcaaaaattacaaaatgaagataaaaagactaataagaaaaaataataatttttattagcattttagaaagaaactatcgatcgatagtttctttttttgataaaaaatattttttgtttttgcgtaatagtaattaggaacttttcataaatagggagagcttatgcgcaaaaatgaaaacgagttagtagctaaaatcattgatgatccagtattcagctgggtaatggaacaggatgataattgttgcaaactgttgcaggcaattttacctgaattgaatattactcgagtcgaatttgaaacgcaaaagagattaaagtttcatccagaaaaacggggaacgattccagatattttagcttatggtcaaaaaggaagagtctatgatattgaactacaggtattacagaataagtttcttgctcaacgaattcgatattatttttcaatgattgatcagaatttgttgatgagtggtggtaagtatcgagatttaccagggacttatgtgatttttattttgccaaatgatccatatgatcaagatgaaaaatactatgaatttgcttttcagcagttgaaacgaaaaaatccattggtgcttgatactaagcaacacgcaattatcttaaatgcgagtgggagtatcggtgaggttacaccgcgtctacaaggcttttttgacttgattcatgataaaataagtacaaaagatgagtttattgaaaaattgaatcgagaagttaaaaagttcggtactgatccgggaaggagaaaagaacttatggattatcagatgagattagatgatgaaagagaatttggtaaggaactaggtcgagaacaagaagagattaatgcaattcagaagttaataaaaattacccgacaattaaaagcaagcgatgactttatcttgaagcaattaattgctaattatggcgatgatttttcgaaagaagagttgcaagaatttattaaaaagaataaataaaattgaaataagaattatgtaaaaaaacataattcttatttttttagtcaaaaagtgtaatctttttgccaacttcttgtaagtagtgagaaaatataagtgacacttttttataaggattaaatgatgattgaatacaaaaatatttcgaagaaatatcaggatcaaacgattctaaaggatgtttcttttacagtgaaaaaaggagatatcttcgttttagttggacctagtggcagtggcaagactacgctgttaaaaatgttcaatagactgattgaaccgaccaaaggcgagatattgttagatgataaatcaataaaggaatatgatctacgtaaattaagagaaaaaactggttacgttttgcagactgccagtttgtttccaaatttgactgttggtgaaaatatcacaattgttctagagcaagaaggcgttagtcgaacagaacgtcgtaagaggcagaaagaattattaaagtcagttgacctagatcccaaattatattgtgatcggatgccaaatgaactttcaggtggcgagcaacaaagagtaggaattattcgtgccctagctgcaaatcctgaggtagttctaatggatgagcctttttccgctcttgatccagtagtgagaaaacaattacaagacttactacttaatcttcatgatgagcttaataaaacggtgatatttgtaacgcacgacatgcaagaagcaattcgattaggaaacacaattggtgtcttgcatgaaggtattttagagcaagttggtaaacccagagaaattttacgtcatcctgcaactaagtttgttcgagaattttttgccggaaatcgaattaatcaaaaattggacctggaaacactgctcaaaagtgagttaggagtagatcctagattttatccaaaggtagatactttagttcgctatcatgtttacagcgtgcaagatttaatcaaggattgttctaatcatcctgatagtctatttattgcagaaacagagtttggtgaatttctaattgaaccaaaacgagtttggaattttttcttaaagtgggtggctggaaatgattaaatctttatggcaaatgcttttaacagaacacgatcaaatttgggctacgacgcttgttcatattaaaatctcactaattgctctccttatcgcaatggtaattgcaattccgctagcttttattttaaagggacataaaaaagtagctgaattcacactgcaaattgctggtattattcaaactattccaagcttagcaattctaggtttgttattaccttttgtcggaattgggactacacctgcgattattgccttagttttatatgcaataatgcctatttttcagaatacttattcaggtttaacagatattcctgataatttagaagaagcagcaactgcctttggtctgacaaaatggaagaaattacagcgattagaaatcccaatggccatgccgatgatttttgctggagttcgaattgctttagtaatgattattggtacagcaacacttgcagccttaattggtggtggtggactaggtacttacatttatgtcggcattaattcaaataacaatactgaagttttaatgggtgcaattttatccgcactgcttgccttagtatttagtggcgttttaaaatttattgctaaaaataataagcgactcaagtggggaagtattattatcgctgtaattttgctcatttggggcggaagcagtttatatactcacttcactagcacttcaaagaataatattgctgaaccaaaacaaacaattacaattgccgggaaaatgggctctgagccagctattttaattaatatgtataaagacctgattgaaaagaatgatccaaataccaaggtagtcttaaagcctaattttggtggaacaacatttttatttaaggctcttcagacagataaagttgatatttatcctgaattcactggaacagttttgcaaaccttagttaaaacaggtaaaaagactggcaatgatccaaatcaagtttatgttgaagctagaagcgatttaaagaaacaatttgatatggaatacttaaagccaatggcttatcaaaacggttatgctttggcaacaacgcagaaatttgcaaaagacaaccatttgactaaaatgagtgatttaaaccgcgttaataaaaaagttcacgcagcttttgatccagactttacttctttaaaagatgggtatcctggattaaagaaaatttataagttggattttgcatcaattaaaagtactgaatcaagtattcgttatcatgctattgcgaataatcaagctaatattgttgatggctacactactgatgccgagattaaaaagtataacttagtaatgcttgatgatgataaaaaattcttcccaccttatcaaggtgctccgttgatgaaggcaaaatttgcagaaagaaatcctcaaattgtaaaagcattaaataaactagctggtaaaattacaactcaagaaatgcaggaaatgaattatcaggttaatgttaagcacgaaaagccagctaaagtggctcatgattatttggtaaaacatggattaatttagaaaagagatagaaatgaaaaaatatacagtaaaaagcgagctaactggtactccttggcaaattgaaaatagaaccaagaagcataaatttatggctgatgaatcagcaagcggcaaaaatgttgctcctaatccagtagagtatttagctggtgcagtaaattcttgtatttcaatttctgcaggaatgattgctaacgttcatcatttagatgtaaaaaacttcaaagttacaacacaagcaattactactaagttaggacatgggaagtcagttgtcagtgaaatgttaattacagtttcttttgacagctccatgtctcaagaagaaaagcaggactttttagcacataccctgcatgtttcaactgtttatcaaacagtatctcaaagtgttaaaacttacgtagaattagagaaataatatttcaaaatgctcttagtcattcagattaggagcatttttgcttttttagggcagatagggcaagatataagttaattaagttttagggggatttaatttgaagaaaataattgctaaaccagttgggatgtttgaattattttatgatttagtttttgtttatgccatatctcgaattacggccatgattcatcatccagttaatggaagtattcctttaattacatttttgcagttcttattagttgtcattgtagtaatgcaaatttagctttaccaagttatttattttaatcgctatagtaaaaatagtttctgggatcttagcgacctagttttaaatatgtttgttgcagtgtatttagctaataatatcaatactgaatggcgaattacatttcattattttaatatcgcaatggcagtaatgatcgcaacgctattttgtcagataagttaattaatcatcatcaaattagtaagggctttgtattaatgtacagtcatatttccattgtagttgagaccgtaaaatagtttgtgtaaggatgaattattccttaatttaatttcctaaaacattagaaaaaggagttcctttctcgtatgattggtttgaacaaaaaacatacagaaagaagaactccttcatgaatgattttaccaaaaatataactcaagctctattcaatcaagataaaattaatgatttgcttcgtcatgaaatccaacaagctgttaatgacatgttagaatctgaactgactgcctttttaggatatgatccctatgctagaaatggctggaatactggtaattctagaaatggtgcgtatttccgtaaaattgatacccagtttggatcaattgaggtacaagtgccacgagatcgcaatggtatgtttcatcaacacactctgccagactataaacaacatactgatctcttagaagatatggttataaagctttattctaaaggtgtaaccactagagaaatagctaatttgatcgaaaaaatgtatggcagtcattatagtccagctcaagtgtctaatatctctaagcaaatgattcctaaagttgaggcttatcacaagcgtaagctgagcgataagttcttttgtgtttatcttgatacaacgtatataccgttgcgtcgagaaacttttgaacgagaagcagtatatattgccattggcatcaagcctaatggtcacaaggaagttatcgactactgcattgcgcctagtgagaatattgaagtctggacggcgttgctccagaacatgaaatctcgtggtttaaagcaagtagagcttttcctttcagatggcgttgtcggcatgaaagcagcactggcaaagacctatcctcaagctcatttccaacgctgcttggtccatgttatgcgcaacatctgcgctaaagtacgcgtggacgatcgcgaggcaatcatgaacgaattcaagcagattcaccagcaagccaataaagcggctgctgttgatgtattgcatgctttttatgccaaatggaacaagagctacaatcgtgtcattagaaacctgaaagacatcgagccagacctgcttgttttttataattatcctaagcagatcagggcttcaatttactctaccaacatgatcgaatcctttaataacgtcattaagcgcaaggctaagcctaaagcggagttcccgactgaacagtcgcttgatacttttattggcatccaagcaatgagctacaatgaccgctacttcaaccgaattcacaaaggctttggtcaagtccaggataccttagaatcctattttgaataaataaaacgttaaaaaaacaatttacgagaaagatctatttacacaaaaaatttgacagtttcttgtagtttctattttgttaatgacagtatctttcctttatctacaaattagaaatgtaaataaaagcttcttatttttcttaatcattggctcactaggtttgtactacttttctttaagtattaatcaaatatataacaaaaataagtgcaaatttgctattcgtgattttctagtattaataattacctttttgttggggatagtttatttatggtttgtaataagatctgaattaggtattgcaatctgcttgttaatttggaacttgacatttttcttaatttttctaatgaaaagcaagaattctttaaattagtgtaagtatgattattaaaaaattgttgactgctataatattagtaaatcaataaagaaggtttaatatggacatttatggtggctataccccagttctaaataaattacttaatcagatgctggaatattttagaaaagaaaataaaattcaccaagaaaaaaccggtgacagtctttatgaacatttaattggtcgagttaagagacccgaaagcatgattgaaaaatgtcagcgaaaagaattaccagtaactccagagtcagcaatgaaaaaaattcgagacagcgttggaattcgggttgtttgtaattttattgatgatatatatacttgtattgatttgattcgaaattgggatgatgtagcaattgttaaacaaaaagactacattactaatgctaagcctaatggttaccgttcttatcatatgattttagatgttgaaagacctgagaaagatgttgaaggtaatactcctggtcactactatgttgaagtgcaacttagaacgattgcaatggatacttgggcaagtttagagcatgagatgaagtataagcataaaataaaaaatcctgaaatgattggtaaagagctaaagcgggtggcagatgaattagcttcttgcgatgtaagcatgcagactttgcgtcatttgattagagaggaagactaacttaatgaaaattttactggcagaagatgaagagcaactgtcccgtgttttggtagcggcgatgcaaagcgttaattacgatgtcgacgctgtttttaatggccgggatgctgtagaacttgctaaaaagaattcatatgatgttattatcctagatatcatgatgccgattatggatggaatcaccgccttgaaacaaattcgaaaaagcggcgataagacctatgtattaatgcttactgcaaaagcagaaattgatgatcgtgtaactggtttagatagtggagcagatgattacttaactaagcctttttcattaaaagagttactcgctcgtttacggtcaaaggaaagacgggatgatcaatatactcctaatgaagttgaagttggtgatctggccttgaatgtatctgagcaagagctagtaagtcataattcaattcgactaggtagtaaagaaacgcaacttttaaactatctgatgctcaatgaaggtaaagagttttcaacttcagacttattagcgcatgtttggaaagatgaagacgatgctaatgaagaggtagtttggatttatatttcctatttaagacaaaaactccgatctattcaaagctcagtccagattgtaggtgaaaagggcggtagtttttcattaattaggtaggtgagattaatgattcaaaaatttcgctggaagtttattggaatgtcgattacggctttgtttgttgttttagtgattacattaggtacattacttgggattagctatactcagagccataatgaagtggaccgagtattgacaaccttagtcaataatcaaggtcaattaacgccacgtaacgctaaaccagtttttggtaatcaaaaagatccaattaataaaaattttttagctggtgaatataatccagaagctatttttcaatatcgctattttacggttgcaagtaccaagaataatacaccaaaaataataaatgatgataatgtgtatgatgtagcgcgaaagcaaattattggtacaagcaaacaggtttttaaggataaagtaactagtggctcagtcaatatcggcagtaatcagtatgcttatcgagtaggtaaggattcaaaaggtaatcaatttattgtctatttgaacgaatccctaatctatcatcgattttcccttttatttagagtttcaattttactgggattaattgctttaattgtttttgccctaatcttaatcttggtatcaaaaaaggcaattggtccgataattactacttatcataaacaacgtgaatttattactaatgcggggcatgaattaaagacacctttagcaattatttcagccaatactgaaatggaagaaatgctagggaataattcagaatggaataagagtacaaaagagcaagttgatcgcttaactaggttgattaacagattaattgctttggcaagaaccggtgaaactggagaagtcgttttaaataaagttaacttttctgaaattgttaaaaagaatgttactagttttaagtctgtaatgcagaagaatgacttgaaatataatgcgatgattatgccagatttatatgtaaaagccgaaaggaatattttgagtgaattgactaatattttattagataatgcacgtaaatattgtgatcgagatggtgaagttagggtaagtttgactaagggaaagcttggcactaatgcaattttacgagtagctaacacttataaagaaggcaaagggaaggactattctcacttctttgaaagattttatcgtgaagatgagtctcataattcaaagaagtctggctttggtattggtttagccatggctcaagagattgtacaaaccttccatggtaaaattcatgttagtcataaagatgacatgatcgtgttcacggtaattttaaaattagcaaaataaaagcagttagttttcaattttgaagactagctgctttttgcatatactgattttttatttacatttcatgaaaagtcaattgagtcttatctaagtcaattgtataagtctcatcttcaagtggacgtttagtcatcccttgatcggttgaatagataatcaagcctaatcttgcaccagctggtaagcgatagaaggtaggttgcaattcgaattctaagtcatagaatttacctgcttcaatcttttctgcgtgtttcatatcagcatagttttggacattcatatgagccttagtgatcaacttagcctttgtttctttatcaggaacaaattctttcattacttctgtaccaaagcgatagcctaattcttggatttgatcattgaatgatttaggaataggagtaagacgttttcttgatcctaaatcaactaaggctactgaaatctgtcccttcggaagagagctagcaacactcattttaatcttaggacggccaactaaagttacagtatgaatgaactcatcagttacaaagcgtaattgttggtcaagccacttttcttcaccagagataaagtcatattgccatttgctttcggaaattttggcttctttgaagactttaccaccttgatctgtgaacgaaagtttatcattatcttcgccaccatcttttaagagattaccttttttatcagggaagtaaatttcttttctacctaattcattgttccaagttggttcttcatgccatacatctggttgtaagttatcttggatcataacatcttcccattgcttgtaggcattattcttgatacctaataattcatgacagaaccataagttcattaagtctgagaagtcaattgaaagtaagttattcatgttgtagtgcggaccctggtgcaagaataatttatgagcaattggtaatttagataccttttgccaaactttataaacattctttggcttaacgttccagtcatttaaaccgtgaactgagatccaagagcatttaatattgtcggtgtggtggcggtaatttctagcttcccagaaatcagaatattgaccagtttcacgatctgatttttctaaaagacgtttttgcatagcatcaaacttcggcttaatcttgagatagtcgcctgcatcccaaaggttagactgacaagtttcagcaagcatatctaaatcttcaccttggcaagcttctggagcaataactaatccatgttcacgatagtaatcataccaagaagaaatggcggcttctgaaacgacagttttaagaccggctacaccagtagtggcgatagcaatttgaagtgtacctaagtatgaacgaccagtcattccgatattgccattgcaccaagaagcctttgtttcgtgctttctcgtacggtcagtataagcaattctgtcgccatgaagccattcgataatttctttagcagattcagtttcttcaggtgctcccgtaattcttaaaccatctgaaccacgagtcccgattgcgcctgcgtaaacatttgcaaatccacgtgcaagcaagtattcatttaaagagtaggcagctttatgaactgcttcttcagttgctgcttgatcttcgctagctggctttttagccttagcggtcggcattgcttcatatttagggtaagtactcttagtagcatcttctaagttaacatctacattgtggttacgtttttcattagcaatgatcccaccaaagtaaggatcagcagtgtagagtgcaggaaacttaaagttatttgattggtatgggcgaaagactgttacttgcaataaatcaggtttaccgtcttcatcagtatcaagatcactttcaacgtaaacaacttcacgaataaccttactcatgtcaaaaacaggtaaggatttaccattaaagtacataaatttattgttaccgtagaattgtgtgaaatagcccttgcccgccatattatcaatgaaagtttgaccatttttggtacgagtattaagaagacgatagaagaccttaattaattcatcacggtcaatcttttcttggtcagtataaggaagagcatttgccttcatgcgaactaggggatcttttaaatcatagtcatatcctacatgatagccaagcagttgtaaggcaatattatagaaactattgcgtgaaattgaggctggatttttagctaaaaaatcttttagattttcatttgcgctaactgcaaactctgcaagtttagcttcttttgcaccataagtttttgcttccgcaattgaattttcgactaaagtagctaaaagatcagaaaagctgttttctttccaattaccaggtaagaaattgatggattctaattctttaaccatttggtcaaaatcagtttgaagataaccatattgattgtatttcattaaatatacgctcccttttatataatctcttactcataattttactagttttacttcaataaaagaagaaataaaaatgccgcaaattttgcgacattttttgatagatttaagtgtccttcaattaattggttttgttttcagtatattcatttccagattgataatcattgaaatcttcaccattaagatggaaatgttcgccataaactaagttaatgatttttggatttcgattatcttctagaccaaagaggacataatccgtccatttatttctgctaaaacttgtgtcaaaaatctttgcttaatacagttaatttagcaaggagtaagcttttatcaagatgagttacttcttcaaagatcatagaatcgataactgtttcgtcaactgttccagagtttctcttaagttcaatttctttgaccatggctttgtagtagtttcgatcaaggacttttaacttggtacttagagttaacatacttttcccttaacaactggctatataggaactgtgcgtgaatatagacttctttataagccgtgaagtcatctttaggattaggtttaatgaatttgatattgagacgatgtaatagtttttggtatttatcgaatctttggttaggatagaaaagtttataattattatcgccagaatttttaatgagataattagaatgatattcaaaacgtagccgtattttaaatatgaaatcataaagagcagcaataatataagaactgaaaaagataaatactaagatagcgcagccacctaatatccctccaatagaagaattgctaccatcactactatcagatgaagtgtaactagttcctccgccacctgaagaaccaccagtactgtgaccgccaccggttgatcccattgaagcaaagaccggttgagaaaaatgaggattagttgtagtaacgcttatacctaagaatagaagacaaactaaaataattattttaactttctttttcataaaatcgcccaataaataaaatgcgttatttatattttaactaaataagaagaaaaaaagcaaattaagatttaaagatattttttagattttgatgaatataactaaattatttttaattcaaaagctggtaagtaagatttttatttcttataataaatacttgagaagctataaatattggaggtcaaaatatggcagaagttaaacgtttttatgaaacttttcacccagatcattatgatatctatttagatattagccgtgaaaaaaagagcttccacggtaaaactgttgtggttggggatgctcaagaagaattagttaaattaaatcaaaagtacttaaagattacctcagttagagtcgatcaaaagaaggctgattttgattataacgataaagaagaagtcgttaatattaaggctggtaaagttggtgagatgaaaattgaggttgactttgaaggtaagttaactgattcaatgatgggtatttatccttcttactatgaggttgatggcgaaaagaagcaactagttggtactcaatttgaaactacttttgctcgtcaagccttcccatgtgttgatgaaccagaagctaaagctacttttgcacttgcaattaagtttgatgagaagcctggcgaaacgattatttccaatcaaccggaagagaagtttaaagatggtgttcactactttaagccaactttacgtatgtctagctacttagttgcttttgtctttggcgatatgcaaaagaaattgactaagaccaagtctggcgttgaaattggcgtttttgcaacaaaagcacataaagcaaaagaattggacttcgctttagatattgctaaacgctcaattgaattttatgaagatttctatgaaacaccatatccattagagcattcatatcaagttgcactccctgacttttcagcaggtgcaatggaaaactggggttgtgtaacttaccgagaagcatacttattacttgatcctgacaatacttcattagacatgaagcaattagttgcaactgttattgctcatgaattagctcaccaatggttcggtgatttagtaaccatgaagtggtgggacaacttatggcttaacgaaagttttgctaatatgatggaatatgtagcagttgatgccttagagccaaattggaagatttgggagatgttccaaacttcagaagttccggcagcccttcaaagagatgcaactgatggtgtgcaatcagttcacgtaatggttaatgatccagctgaaattgatgctttgtttgattctgcaattgtttatgcaaaaggttcacgaatgctagtaatggtacgtgcattacttggcgataaggctcttcgtgagggattaaagaattactttgcagctcatcaatatagtaatgccacaggtgacgacttatggaaggcacttggtgaagcaagtggccttgatattggtgcaattatgcattcttggttagagcaaccaggttatccagtagttaatgctaaagttgaagatggtaaattagtcttaactcaaaaacaattcttcattggtgaaggtaaagatgttggtcgtaagtggcaaattccattgaatgctaattatacagctgtacctaagatcatgaaggatgaaaaactagttgttggtgactataaagatttacttgctaataacggcacacctttccgcttaaatgttggtaataattctgactttattgttaagtatgatcaaactttacttgatgatattttaagtcatgttgatgaattagatgcagttgataaattacaattgcttcaagactttagattactagcagaaggcggtcaaatgtcttacgcagatattgtgccacttcttcctaaatttgcagattcaacttcaccaattgttaataatgcattgtacagaattatggctactttgcgtaattttgtaacacctggctcagatgaagaaaagcaattgaagaaactttatgatttgctttctgaaaaacaagttaaacgtttaggcttacttcctaaggctggcgaatctaacgatgataatttaactagaccatatgtagtttcagcttctctatatgctgaaaatgatgatacaattaatggtcttcacgctatttattcagaaaattctgataacttagagggtatttcagctgatatcagaagtgctgttttagctaacgaagttaagaactttggtaatatgaccttgtttgacaagttaattaaaaagtaccaagaaacttctgatgcaagcttgaagcaagacttatgtgccggtattacttcgactaagatgcctgaaattattgacgcaattgttgatgattttgaaaatgcacaagttgttaaacctcaagatttgcgtgcatggtaccgcaacgtattagctaatccatttggtcaagaacaggcttggaattggattagattagaatggccatggcttgaagcaactgttggtggtgatatggaatttgctactttcattacggtaacagcgaatattttccatactgaggaaagattgaaccaattcaaagacttcttcgaaccaaagattaatactccaggattaacccgtgaaattaagatggatactaaagtaatcgaaactaaggtaaacttagttaagaaggagcaagctgctgtaaatgcagcaattgccaaagcagttgactaaaaataaagattaaatgagttaaaaaagatgcgctttcagttttgaaagcgcatttttgatataatttataaaataggggtgacttaatttgataaaaacaatcttttttgatgttgacggaatattagtttcacataaaacagatagtgtgcctaaaagtactagagaggcacttgaacttttacgtaaaaatggcatcaaactcgtgttagctactgggcgtgatatgagccaactaaagaaattaccggttaaagatataaaatttgatggttatttgacgatgaatggacaactttgtctagatgaaaatggtaatgaactttttggtaatcctattaatgaacaagatactgaaaaattggttaaactaattaaagagaagactgtcccgattactactatcggtaaagaaggaccgtacattaattttgtaacagatcaagtagttgctgctcaaaaggctgtttctagtaaagttgcgccagttggtaaatatcatggtgaaaatgtctatcaatttattgcatatggaaaccgtgatgacttgagaaaattggttgatgatcttccaaactgtaaattaagttggtggaatgagtatgcagtagatattatttcaaaagatggtggtaaactagctggcgttgagaagtatcttaaattgcagggtcaaactttagcagatgccatggcttttggcgatggtgaaaatgatttagagatgcttaaagctgttcaaacgggtgttgctatgggtaacggagaagaacaagtgaagcagattgctgattatgtgaccagtgatattaatgaggatggaatctataatgcctgcaagcactataagttgatttaaaacagcactataataaaagcaaagattaagtttgggagaaatttgatgaaaataattaagtgtgtattcaaatggatagggatcgccatttgcctattttttatttttgcttttatgcaagtaccaattttggaaagtacacctgtatattcaatcgatagtcagcagcaatttattgaagcttttaagcatgtgaatatgtttcataatatatttatgataattatctttacaattatcacatttattatggaatggtatgtttgtaaatggctaaataataaattggatttttcaaaaaaattaagtcgaaaaaatctgattttatcattaggagcaggtgtattttgttttattcttcagttattaacaatgttttctgtctttgttaatgccaaaccggatgtatttacagaaacattgaaaacaggattagctgtacctttaatcttatccctagctgtaatcggccccactttagaagaattattatttcaagctggaattcaaaaaggtattttcaaaaggttaaatccatggatagcgattattttgacggcaattatttttgctggtgctcataatgtaactctgaattggtcatttttgaatagatttttatccggagtagcttttggatatgtttaccagaagacggatgatataaaaatggcaattttgagtcatagtatatctaatcttttaccactgataatctgctgcatgcaggcctggagttgaaaaatcaatttaaataaatttcttcaaaaaataattgacatccaactgccttttccctatactagaatatgttctgttaaggaattggtttggtagctcagctggatagagcaacggtcttctaaaccgtgggtcgtgagttcgaatctcatccaaatcactgacaagacgctccgtatggggcgtctttttttgtgcaattttgcttctttttgatatagaccaattgtaaataaaacttcttgaccaatttttaatatagggttattattgctcatatgacaacgaataaaagatagtccatttattttaaatgaactataccaaaggagaaaaatgtatgtgtggaattgttggtgttgttggaaaacctgcaagagatgttattttaaatggtctaactaacttggaatatcgtggctatgattcagcaggtatgtacttaaatgatcttaatggtaatgaatatttgactaaggcagttggcagaatttctaacttaaaagaaaagctaactccagatgaacaaggcttagttggaattggtcatactcgctgggcaactcacggtaaaccaacagttgataatgctcaccctcattttgatgaaactaagcgtttttacttagttcataatggtgtaattgaaaattatgcagaattaaagaaaaaatacttacaaggtgttaaattccattcaaatactgatactgaagtggttgttcaattaattggtaaaattgctcgtgaaaagaatttagacggcttttctgcatttaaagaagctttgaagttagttaaaggctcatacgcttttctcttggttgataatactgaaccagaccatgtttttattgcaaagaataagtcaccaatgatgctcggtcttggagatggatttaatattattgcttctgatgcaatttctgttttagaccaaactaagacttttgttgatttacaagatggtgatgtaggtgatattaccaaggattcttacacaattgaaactgttgacggtaaaaaagtcgaacgtaaacctcacgtattagatattgatccaaacgcagcttcaaaaggtacttatgaattctatatgctaaaagaaatcgatgagcaaccaagcgttatgcgtaaaatttctcaaacttattttgatgaaaatagtgacgttaaggttgagcctcaaatcattgatgttctttctaaagcagatcgaatttatatttatgcagcaggtactagttaccatgctggcttagtcggaaagacacttttagaacactacacaggtattccaacagaagttggtttagcttcagaagctggctatcacttcccaatgatgagtaaaaagccattttttatttttctaactcaatctggagaaaccgctgattcacgcgttgttttaaaagaagttaataagcgtaatataccaagtttaaccattactaacgtagaaggatcaactttatcaagagaagcagactacacgatgctactagaagccggtcctgaaattgctgttgcatctactaaagcttatactgctcaaatcgccgttcaagcagtacttgctaaagctttgggtgaagcacttaataatcaagatgcaaaagattggaacttaaaacatgacctagctattgcggctgaagggatgcaacaacttgttgatagtaaggaaagcttaaaagaaatcgccgacaagtacttaattaagtcacgcaatgccttctatattggacgcggaattgactatgccgttgccttagaaggagcattgaagcttaaagaagtttcatacattcaaactgaaggttttgcggcagctgaattaaaacatggaactatttctcttattgaaaaaggtactccagttattgctttaattaatgatccagctactgccgacttaactcgtggtaacattcaagaagttgtttctcgcggagctaatattattacaattgttggtaaggattttgctagagagggcgacgatatcgtattaccagaaattaactactatatgtctgcacttctaactgttgtaccagctcaactccttgcttattatgcttctaaagataagggcttagatgttgataagccacgtaacttggctaagagtgtgacagttgaataaaaattaaaccaaactagtaaaatagcgaattagtgattttaaaagtgactaattcgctatttttaattaaatgtttttgatcgaaaatatgagtatttgatttaaaataaggatagttaataattaatgaggataattatgctatcaaaaatatcaattttacttacaaatcaccaacttacattaaaagatatttctcaaaatcagcacttggcagaacaagatttaaaaaaagaacttaatgaaaatcctgataattggtcaagctcagttttatcagctttgtcgtcatctttgaacatgcggcctggagacttattagaattacttgatccagtttattctttgaagattaatgatcatcatcaaatgattcaaggaatctatattgaagatcctgaagtttatgaacaaattcgctttgtggtagaaagtgagcatttagaaggttggcaacctgacgaagaggatattttaagattgcttgatgaagcaattaatccatctcctaagttccaaactgaaataagtcggatttggggtgagaaagatgagtgaggagccaaaagatacagaatggtatcgcagaaagtttctttatcctaatggaacgcttaaaaataaactcaatattaaggatgcggcagaattagcgcaaaaagaatacttaggttcagctgtgcgcgcattagcttttttgaggaagaataaaaagattactagcgttgaagatttgaagaaaattcataagattatgtttggctggctttatgattgggcaggacaaattcgagattatgagttgattaagggagatactgagtttctagaatatactcggattaagtttgggatcgaagaaatagatgagaaaatgagacaattagcgagtcgaaaagaacttgctaatactgattatgcttttttgcttgatcgtttgaattatcttcatccctttagagaaggaaatggtaggagtagcaagttgtttttacaagcttttgctgcgaatcacggacaagttattgattatccgcgatcaaataaagaattaattattgctcaaaataatgcagatattaaccaaattgctaagttaattaagatcaagccaaaagctaagaaaatgaatgctagataaaaaaagtatcccaatgataatttttcgtcattaggatgcttttttaattgaacagaaaactaattttgaccaatttattttctttaaaccaagtccagcaaagatgtaataaataagcagaagcaaaagataaacaccaagtaaaaatccatgtcccaaagaaagttaaaaagggatgatagtgagcgtgaaatgacatatttaggccgcgccaaactaattggttccagaatacattagaaagatatgcacgataggcataaatagccaaaaaatgaaaaatttttagactagtttgagaatttttctttacttgatgcaagcaaaatgcagcaattagagcaataactgctaaagagtatagtgtcatggaaggtttataatacggagcattattaaaattaatggggtggccaaaactttgtagttcaagattggtccaaatgaaacaaatgataaaaataatactaagcagccaccaaaatttagtaaaaaatgcgttaacataatcgcgtaattgccaggccaaaacaccatagacgccatagataaagaaagagataaaagctctatccagtaaataccaatcgttttgatggatgccatgaaagacataggtgtcgtaaaaccaaagccaggtgaaataaaggataaacgtaacgattgcaattatgattccacgtttaatattagttcccacatagcgactaatcgcccaaaagagtggcattaggatgataaattgtagcatcatcgtgttataccaaagatgaggagcagcatttccgttaatgaattgccagcaaaaagttggaaaattatagtatttgtttacttgctgttcccagggcattcctagtaaataaattaaagtccaccagatagtcggtacgaataagttagaccaattattgcgaaggtatttattatataaaaagtgattttttaaatcataggttctagtagttgtatataagattccaaaaataaaagcaggggcagtatattttactagattatataggagaccaaaaatatcttgagtatgagctggttgcctgatgtccataactaaggacataattggttgcgacatgacggcagtacatgcaaagactttaaggtagtcgccaatatcagctgttttaaatgataaaaattgatattttttcataaattagttccttcattagtagagaaaaggtctacaaactcactcttaatatattcatctttttgaaaaaagacaagttgtctgtaattaggcgcttaacaattattaaaatttgaactaggatataaatgactgatcgaaacttctcctcctaagaagtgtaacaatttatttttcttcattagatcatgttaagctgcagtcagaaatggttgcagctttttatttatagtcataaaaggattaaaattaagatattaatacaataaagaatttaaagaaggtatatatgatgaacgtagaagaagcaattttaacccggcatgcagttcgtttatttaatccagacgataagatttcaaaagggagtctagaaaaaattgttgaactagctcaacacgctccttcatgggtagattcacaaccttggaaggtatatattgcaacgggtaacacactagcagcaattaaaaaacgtcatgctgaaaatgttaagaacggtgttaaagcaaatcctgactggccaaccactcacagagaagattgggctaagtttccaagagaaaatatgctaaagcataatgaagcaaccgctcatttttgggaaaatccagagttgtctgacatgacacgtcaggatctacagacacgtctttatgatgcaccagcaatttgctacttaactattcctaaagattcaaatcaatggtcagattacgatttaggtgcttttggtcaaactttgatgttggcagctagaggaatgggaattgattcaatgccagcttatgaaattgtgaaatttccagaatctgttaaacaaattatgaatattcctgactctgaatggcttgcaatgggaatagctttaggatatgcagatatggcaactagagttaacgaatatcgcgctccgcgtgtgccattagatgaaatgctaaaaataaaggattaaaaaagacgccgctgaggacgtcttttctgaagaaaatataattaatgaagagatgcagccttttgggcatgcattttttcttgcatttgtttttgtaatttttgcatatctttagttgagataattttccagtttgagggaagagtaaaagtatactctctatgttttaattcattattatgattaaagatattaaacatcatacgactaaaattatctttgtaaacataccgagtggttcttatttttagacttggctgtttgccgtgattaattttagttgaaaccttatctaatttaattgctctaggcttcttctgattgttattagtcttatataaatatactttttctgtcccattacctagaggttggtaaagtagaagtggaaggttaggactagcacttgaaactaaatgttgtgtcttagtctgtgtttcagtcttcatcccccagtgattgtagtcatgtgcgacgatactcagcacgcaaagtaaagtaatgattaaagaaatccatgaaactagagtatggcctttaccagggatgacattaaaatatataaataaaattgctgccaaaattagaattacaattatcattatccattcacctcttcttggttttcacgtgcgcggttgcccttttttaagaagaaagcaagaactaaagcaactaaggcaaaaagaatactcattgcaaatgaagcacggaatccgtctagagtggcattaattgcctgatttttatattgaagtggcaaagtatggagtaaatctttgtttggcatattattgttagttgtagtggttaaaactgaaactaagatagctgtaccaatagaacttaagacctgtctgaacgtattatttactgctgttccgtgagcgattttatttaaaggcaatgagttcattcctgaagtggtaacattcatcataactaaagcgacaccaaccattctaattgcgtataaaacaataatcatagtatatgagctttctgcagttaagaatacaaatggaatagtaccaagcgttaaaagagtcattccagtaattgccattttacgtgcaccatatttatcgaataaacgccccgtaattggtgacatgattccgatcattaaggcaccaggtaatagtatcaatcctgagtgaaatgccgacacaccacgtaggttttgaatatataatggtaataccatttcaatacccaccattgctaaattggtaataccacttaaagcagctgctaaagaaaattcgaaatgtttgaagacagtgatatccaaaaatggatctgccatttttaattggcgaataccaaaaagaataacaaatacaattcctacgccaataaatcctaaaatttcggggttagtccatcctttattaccagcttctgaaaaaccataaagtaaactaccaaaacccacagttgaggttgtcactgaccaaacatcaattttttctttcttagttggaagaacgtctttaattaagaaaaacgctaaaataataaccattccagcaattggagcaataatactgaataagtagcgccaagaaagattatcaacaatccagccagataaggttggaccaatagctggtgcgaggccaataacaatcccaactgttcccatcgcagcaccgcgcttattagcgggaaagattgaaagcatgatggtttgaagcaatggcatagtaacaccaacacccaacccttgaataattcttccagttaataaagtgccgaaatttggcgcaagtgcagctgtcactgtcccgataaagaaaacagacattgctgtcaaatacattttccttgagccaaaacgattaattaaccaagctgagactggaatcataaccccattaactaacaaaaatgcagttgaaagccattcagcagtggcagtactgatatgaaaggaacgcataattgaaggaagagctgttgcaagcaaggtcccgtttaaaacagtacagaaagatccaataattaaaactaaaacaagcaagtttcgattataggcttttccgtgaatatcggttggttgttgatccatttgaattatcctttctattgttaaaaaatcttacaaactataagaactatatgcttaaatcaaagcattgtcaaattttcttacacaagagtaatagaatctaacatatatgttgtaaaaacttacataagctattaaactataaataagattacgaggtaaggaattaaacaatggaatcaaaaaagatccttcataatgtttttcaaaatattgaagtaggaattggggaagtcagcaaagtagttggcgtgtcacaaagacaattacgctattgggagaaaaagggctatattaagcccatttctgatgataatagcggtgttagaagatacaatttatcaactttatatttaattgtttttattaaagagcaacttgataatggttttactttagctgctgcttttgaacgatcaaaagatatcaagctaaagagtaaaattgttcgaaccttttttgagcatactttcagcgatgttgaaattactgatgcagagaagggatatggtgaaatagatttaggtgatttccgtaccgaagatggtgagaagtatcacttcaaaggtgtccttgatgcgcatggtaggtatgtaaaaattgataaataaagaaggaagcatctggaatgtgatgcttccttcttaggacaagtcgatattgttttttctataatttatgttgattaaacttattatttagtaaagcccgcttcataccaaacattagcagaaggttttaatgaccaaccagagactttactatttacagctgttactgaataggcaccactagttgggactacatacgctttgttgtacatccatttttgccattcatgaaatttttgcacccgatattttttatcaaaagatttggcagaatcgatttcattcaataatttagtgtttgtcggagaaacaaaacgggcaaaattataaggcattttttcaccataaaagacgcttggagaaggatcacctgctgcgccacaagctccttcaagaacatcaatcttaggatcactggctttaacagctgctacccagcgattaaattccattggccgcccgcctaggaacttaacgtttaagccggcttttttccattgttgaatgtagttacgccagatagcttcgctattttcaccagaaccacgtactgctagattgataactaatggtttaccatttggctgacttcgatagagtgcaccaggagcttttttatagcccgctttatctagtagtttattggctttatctagattgtaagaatagacaggaatatttttatcataatatggagtaaattgtgaaggaatcaaagaattaatcctgaattctaaaccatggtagaaacgtttattaataacatcaacattcattgcataagccattgcttttcgtaaagcaggattattcatcttagcatgaggattttcaacgtttttaccaagttttgcatcccattttccgaccttaaaggctaagtagtcgtaactaagtgtttttttgccgacaaaattgacgcctttagtattttttacctgttcccattgcgagctaagaacatttgcaacgtcgaattttttgctcttaattgcttgtgaaacattagaattagtaatatttgacatgtaaatatgttcaaaattaggtttaccgcgccagtaatatggatttcttgaccaactagtagattggccttgtacagttttgtccattttatatggacaaaagtagagtgggtgctttcttatttgcggactagaaacaagtttttcaaagggaacgtttttcaaataatggtaaggagcagcatgttcccagaaaaaaccattagctgagttcatcattgctggttttaattccttaaagtgaagaattaatgtttttccatttggtccgtctggcatttcaagacctgaaatattgttggcttttccccgatggtattcagccattcccttgatattttcaagcgaagaagtatattgagtagtttgaactttaggattagctaaaatttcgtatgcatactctaaatccttggctgttactggttttccatcagaccaacgaaccttcttttttactttgatttcagcagtattgttactatgatttaactttaaactagcagcacccttattggtaaattgataatgatcattaatatcaaaaagcgcttcatctcctggagcagctgcttcagaatcgggactagtatcagcaatttcagctgaaaaaattccagtaaatggtgattcattttctaaagcataggttaaggttcctccctttttaatgggtttatggggaacagcctgagaaaacttgatgggttgattactagaatcagttttcttagcaccacaagcagttgataaaatcgctagtgagctcgctagtgttacatacagcagtttggactttgacatcttcatataaaattctcctttcgtcaaaaatccaataacagcatgattaagaaaacaaaaagacgccctatcagatcacaatgatctaatagggcgtcttgtcgctgtaccacctatttttactagaaaaactagtctttaataacgtacggttcaatacaagagaacgatacgccgtcgctataaagggctgtcccttaaactactttaaatcgtagtttacgctcaaaggtgattttcattaagactctatctatttcttcacaccaaccagaaattctctgagagacgggtacttaattacttttccttatcaaagctgtttgataataatgtttgtgctcataataatacactgatttggagaccgtaaaatagtttgtgtaaggatgaattattccttaatttaatttcctaaaacattagaaaaaggagttcctttctcgtatgattggtttgaacaaaaaaaacatacagaaagaagaactccttcatgaatgattttaccaaaaatataactcaagctctattcaatcaagataaaattaatgatttgcttcgtcatgaaatccaacaagctgttaatgacatgttagaatctgaactgactgcctttttaggatatgatccctatgctagaaatggctggaatactggtaattctagaaatggtgcgtatttccgtaaaattgatacccagtttggatcaattgaggtacaagtgccacgagatcgcaatggtatgtttcatcaacacactctgccagactataaacaacatactgatctcttagaagatatggttataaagctttattctaaaggtgtaaccactagagaaatagctaatttgatcgaaaaaatgtatggcagtcattatagtccagctcaagtgtctaatatctctaagcaaatgattcctaaagttgaggcttatcacaagcgtaagctgagcgataagttcttttgtgtttatcttgatacaacgtatataccgttgcatcgagaaacttttgaacgagaagcagtatatattgccattggcatcaagcctaatggtcacaaggaagttatcgactactgcattgcgcctagtgagaatattgaagtctggacggcgttgctccagaacatgaaatctcgtggtttaaagcaagtagagcttttcctttcagatggcgttgtcggcatgaaagcagcactggcaaagacctatcctcaagctcatttccaacgctgcttggtccatgttatgcgcaacatctgcgctaaagtacgcgtggacgatcgcgaggcaatcatgaacgaattcaagcagattcaccagcaagccaataaagcggctgctgttgatgtattgcatgctttttatgccaaatggaacaagagctacaatcgtgtcattagaaacctgaaagacatcgagccagacctgcttgttttttataattatcctaagcagatcagggcttcaatttactctaccaacatgatcgaatcctttaataacgtcattaagcgcaaggctaagcctaaagcggagttcccgactgaacagtcgcttgatacttttattggcatccaagcaatgagctacaatgaccgctacttcaaccgaattcacaaaggctttggtcaagtccaggataccttagaatcctattttgaataaataaaacgttaaaaaaacaatttacgagaaagatctatttacacaaaaaatttgacagtttcctgatttgaaaatatgtcaacatgaaattataattttcttatttttattataaacttgtttttataattatatgatgtgtttcagcatgaatttaatgcaaaaaattgcaaacaatatttaatacataggtaaatttaaagttacagattaaaagcaaatgttattgattaaaaatgtgaatgagagggtaaaactaatacttaacatatttattgactgaaataaagctgctaatttgttatttaatataataaaaatattataaaaacttgagcaaaaaagaagattttttctcttaagaggcctatacttgtaattgataagtgatagaaaggaattgtatactatgaagaaattagatacaaacaaattaactgacaaacaagcagatctttttaagaataacttggtttaccttgctactgttgacgaaaatggtaacccacaagttggtcctaaaggttcaatgactgtattagatccaagtcatatgcaatatcttgaaaagactaagggtgcagcttatgaaaacattaagcgtggctctaaagttgcattagttgcagcagacgttccttctcatactgctgttcaagttttagcaactgcacatgttcatgaagatgatgaatatgcaaagaaagttgtatctggtactgatactcctaatgcatttgttgtagtacttgatattgatgaaatttttgaataatttatataaatccaaagattttattctgcctgcattttaatatagtttaagaaagactaagtattgcaaaaatacttggtcttttttgctagataacttgcttattttttatattaatgtaagattaaaactaattaaacaaatctaataaagttaaaaggagaaatgaaaatgggtgctttatcagaacaagaactagcagctttttctgcagattttaataaaaatgataaaaataaagtagcatctcgtgctgctcgtcgaaatggattatttgaagcatcatttaatgatgaagtttcaaaacgtttaaatcatactttttctaccgaacttgatattggtggagtaactgaccaaaagcattctggtcgttgctgggaatttgcaactttgaatgttttgcgtcatcattttggcaaaaaatatcatgttaaggactttactttttcacaagcttataatttcttctgggataagattgaaagagctaacgctttttatgatagtatgattcgtttagctgataagccagttgatgatcgtgaagttgaaacttggttgtattttgcaggtcaagatggtggcttatggcaaatggcaattaatttggtaaaaaaatatggagtagttccatcatacgcaatgccagaaaatgctacgtcaaacaacactacagctttaattgattctttagctcgtaaggaaagaaaagatgccctagtattacgtaaattagttcaagaaggcaagcttgaagaagctgaaaaggctaaaaaggaattcttaaatgaagtttaccgtatggctgcagtagctttgggtgaaccaccaaagaagtttgatttagagtatcgtgatgatgataaaaagtatcatttagaaaaagatttaaccccacgtcaatttgcagaaaagtatttgaaagattttaattgggacgattatgttgtcttattaaactcacctaattatgattacaacaaacgctaccaccaaggtttatatgacaatgttgctggtggccaaccaattactggcttaaatgtgccgattgaagttttggcacgagcagctgcagctcaattgaaagatggaaaagcagttatttttggaaatgatgtcttaaaacaaatggaacgtaaaactggcttccttgatactgatctatacaagactgatgacttgtttagtgttgatactcaaatgagtaaagctgatcgattagctactggtgaaggttctgcaacccatgatatgactttagtcggcgttgatgaagacaatggtgaaattcgtaaatggaaagtagaaaattcttggggcgataaatatggtcacaagggtttctacgaaatgagccagaagtggtttgaagaatatgtttatgatgtagttgttgataagaaatatttacctgaagatttggttaagctttgggaagaaccagctgttgatttgaaaccctgggaacatatcggcttataaagataaaagagatcgaaagatctctttttttaatatcaatttttaaactaaagaatgtcaatatgtaacttgttttgaaagccaatccaccataaaatatcttttgtaagcgctaaacattagaagaggagataatgatgaaaaagaattatttaagcattgatattgggggaacaaacgtaaaatatgctgaacttaataatgcggggaatattattgaacaaggcaaaattaaaacatcgcatgataaagaacaatttttaaaaaatattgatcgaattgtagcgaaatatgtaaaaaaagggattaaagggatctctttttgtgcaccaggaaaaattgcgcatactaaaattcactttggcggagcactaccttttcttgatggcatcgattttgcagtaagatataaaaaatatgatattccagttactgtgattaatgatggtaaagctagcgttttagctgaaaactggcttggtagtctaaaagatatgcaaaattgtgctgcgattactttaggtactggtgttggcggaggaataattgttaatggaaagctgttaaatggggcacattttcaagccggtgaattaagtttcttgcagcttaatatgaaagaacctggatttgatggttttgccggtggttatgcttctgctgttcaaatgatcaagaatgttaacgaagccatcgaaaatgatgatgagactgacggcttagctgcttttgaagcaattaataatggaaatgaaaaggcaaagaaaatttttgatgagtattgtaagcgaattgccgctattattatcgatattcaagccgtagtggacttagatgcaattgcaattggtggtggcatttctgcgcagccaattgtgattcaaggaattaatcaagcttatgatcaagttttagctgataatgaattgattagaaagactttcactcgtccaaagatagttgaggctaaatttaagaatggtgcgaacctctacggggctttgtacaatctctttattcatgtaaatggtgaaaaactataatgacatatggcaaaaaaatcaagcagcatgaaatagtgattcctactgatccgctacctgtttggtattttgtttttcatgatcataattctgaaaaatatattgctccgcactggcatcgaggaattgaattgagctatgttgaaaatgggagaatagatgattttttgatcaataaaaagcactattcttctcaatcaggaacaattttggtagtaaatacgcaagaaattcatagtattcatgattttaggaatactgattcgcttgcattatcaataatttttccatatgactatattgctaatttataccctgatattgctcatcaagtcattaaaattaatgaccctactatgttttccaataagcagaaacttgcctatcttcacttgcaggggttacttagtcagtttattaaagtgtattttcttaaaattccaactaaacacttagaacagcaacgcttaattgatgaaattttatgtctgttattagctaattttactgaagataagaaggatcaggaacaggttagtgagcgtaaagtatatattattaatcgtttacaatacattacacaatatgtaaataaccattatcaagaagagttgaatttagcctttcttgccgaaaagtgtaatatttcaaaagaatatttagcacgcttctttaagaaagaaatggaacttacggttgaaacatatattaataatgtccgagctgaacatgcttatggcgaattaaagaaatccaaaaagaatttaactcaaattgccattagctgtggcttttctagtattagaacgatgaatcgagcttttaaaaaactatatggcaaaagtgcatctgaaatgaagaagaaattaacaaaataggtcaatttgcgccaataattggttaagattggcctattttttagatccatttttagttattatgaaagcgaattcaatgagagagggaaatattatgaaagagcaaaagattctaaatgcagttaaagaaatgcggattagctggaaagaaaatgatgataagagagacagtgggttgccacacgatatcccagaagtaacacgtgtagatgatcttcaatatggtgaggatcctaaatggaatttattagacttatatttgcctaagaatgttaaaggcaagattccagttattattaatattcatggtggtggctgggtttatggaacaaaagaaacttatcaattttatggtttagggatggcgaagagaggatttgcatttgttaatccaaactataaattaggtccagaagttaaatttcctaaggaacttgattaagtaaatgaatatatccattgggtagccgaccatgctgatgaatacaatcttgataaaaataatgtcttcttaattggagattcagctggtggtcagatggctgaacaatatacagctattttgactaatccaaaataccgtgagaaatttggttatacactaacagatttaaaatttagagcggttgctttaaactcaccggcaacttttattaaagatccaggcatgattggaaatggtactttagcatattttgacccagaagtgatgaagagtgcgaagaatcaagatctaattgatgttgaaaaatatattactgaagattttctgccaacctttatttcgactgctaatgaagattttattcatgactgcgctgttagattagatggttttttaagagctaaaggaattgaagttattcaaaagtcttggggcgatgaaaagcatcctgaaccacatgttttcttgattaatcaaaaagatgagttagcaaaagaagctaatgacgaagaagctgaattctttagaaagcatcttgtcaaagattaacagaaatgaagtgggaggaaaataaaatgaacgaaaagaatccacaagatcatgtgatctttaaaatatcattattatcgatttcaatctttttaatgatggcaccagctattgcacctgctttaccgctaatgtatcatgcctttccaggcatagataaggccggggttgaaatgctatcaacgattcctaatatcggaattgtaattggtttattaattagtccatttttaattaagttaatgggagaaaagccaactattattactggtttggtaataactttgttagctggtacttttccaatgtatgcaactgcttatacacctattttaatttctagatttttgatcggtgcaggaattggtttattcaactcacttgctgttagtttaattccgcaattctatagtagtaatgaagaaaaattagccacaatggtgggctatcaaaatgtaatgggtagtttgggagcagcgcttgcatcatttctgattagttggcttttaactatttcatggcatgcagcatttgcaatttatttcttagtaattccagttttgatcttgtttattttatttgttccacttccttcttcaagacaaaagaaggctgacaaagcaaaaaaggcaaaagaaaaacagactattaatggtaaagtaattttaatctcggttttaatgttctttatttttctattttatatgccaatgagttttaagattcctgctttagttgttcaagaaaagttaggaacagttagtgaggtttcagctttaactggagttttgaacttagttggtattccagtaggagcatcatttgggttcttctttaagaaattacacgataagatctttccactaggatttgctttagtagcaatcggtttctttataattgcgttagcaggtaatttcattatgttgagtattggttgcttaattttaggaattggttttggcttaggtgtgccatatatgtacaattggctggactggtcagctccagcaaattcagttaatttagcaacaaccattgttttggtactagttaatgtaggatgcgcaatttcaccaatgattatcaatgcagttacgccaagtgctataatgggattattgatttcggctattttctttgcttgctttttagtatatgcgattattcactatctaagagttcacaaaaagcaaagcgctactgcttaaaactaaatatattcactaattaagcgttagaatattatctagcgctttttttgcgtattaagttataattaagccaaaactcactttttctcacgggggacctatgaaaaaattttttcacctaataattggaatgataatgcttgtaactttaaccattatctttacaaaacctgcatcagctgatgtagattatgatattactaatgttgatgttactgctcatgtaaatataaatggatcattgttgatggagagaagaatcacttataaatttgacgatgatgctcatggtgttttttatcaacaaaatcttactaataatcaagaactaaaaaatcagcaggttagaataatatctggcaagaattcacagcctgtcgtgcaaagtgatagtcacgctaataatacttatgaattgagtcatagcgaccatggctatcgctttaaggtatggcataacgtaactgatggtgataaatttacggtaatttatacttatgaaattacgaatgccatcattaactggaaagatacagccgaactaaattttaaaattattggtgatggctgggatacagatcttgataatgttcgagtaggaatctttttcccgggtccagttaaggatctgaaagcttgggctcatggtgacttgtcgggacaaattacagttaatcctgaaaaaggcaatattattatgacagctgcaaatgtaagtggaaatgaaggaatcgaggttcacagtctttttcctacagcggtaacaagtcaaaataaaaatattagagatcaaaatcataaaaaatatgtcttgaatcaagaagcaaaatttgctcgggaagctaatgaacgtcgtcaaaggagtagaatatttggcttaggtgctttggcactatcaggcttattttctctattcataataattaaaagttttactttgaagaaatctggagtaaagcctaaaaaagaaaagcaattacccagaaattatgatcttcctagagtctcaccagtaatggctgaaattttggatatagataataagccaagttctagatcattaactgcttatttaatggaattagctgtacaaaagaggatagaaattgatccagttaaggtaagaagaaaaacatactataaaatttctttaaccgacaaggacttgaaagatgaagttcctttaataagatacctatttaataaggttggcgatggaaaaagttttacaacctatgaactaaaaaaacatcgatcttctaagttaagtaaaatcttcgcaagttggcagaaacagaaaaagcaagaagcagttagtgctggatttttggataaacagattgagagtaagaaagatactaatttagttttaatgatcatcttgttagtattaagtggcgctggaataattgctgctttcttttcaagtgagggagcagcaggcttatttatagcggctgtaattctgataggagtcgcaattctagcaactatttatagtaataaaaagctatcgccatatactgataagggagcagaggcgactaatcaagtacgtggttttaagaaaatgctagatgagattggtaattttaagatgcgtgaagtcggagaattgcctttgtgggaaaaaattatgccatatgcagttgctttaggtgtatctaaaaaggtattgaagcaacttaaaatagaatttgcagatgaaattgatgatgcaaacattttgttctggggtccattttatagctcaggacaggatggatttgcaagtaattttaattcaagctttaattcaggggcaaacttaaactcatcagcttctggtggatcgggtggtttttccggtggttcatcaggaggctttggtggtggcagcggaggaggcgccttttaaacattatgaataaaatctaaattagaaaatttcaagaaactgactttgatgatttatgtgtaatacacgatcaagcaaggaagcaagaattaaaagcagctaatttaaaagcagccttcaaaccgttgaagattgcagcaattgaagaagacttattttcatataatatttatgtagcagcaatagatgaaaagattgttgcttttgttgcctttagcgatgatgaactcgcctggctttatgtggatcctagttttcaaaagcaaggaattggcagtaaattgattgaattttcattaactaagatgaaacgtccaacttatttagaagtgttaactggtaatcctgcaaaaagtttgtatttacataaaggctttaaatttctgcagcatgaatcaggaaaaatgcctggaaatgagacatttcacgttgaagttgacttattgatttataagtagcaaaaatcgatagttttagttaataaaaagttggggaaaatttgcgaaaaagacaagaatatatttggtgtttaattgcgctaccagacggtaataaagagtggtattgcttaagtaaggtactaagacgggcgctttttattgaaaagaaaaacaatcaattttggaaacaaaccatgattggcaattatattactgttgcaagaagcaagtacattaaagggcgagcaagactaacagttggtcgaattgagaaaattagaattcgtaaaaatggtgctgctgattggcactggagccgtaatcaattcattacagcagagcatctgctcaaccttaaggattcatataattatttgaggcatgactattgttggtataatcgtttagcgatcaaaatggccttaatttattggcataacaaattgctacaaattaaactgaattctataagatatgcagttaaaaagaaacgattaaaattagaaagaacattaaaaaatggaagaaaagattttagttagtcaagatctctcctgcctcggtcaggtttcacttagtgttgccttaccaattttaggagcatgtggctatcagccagatgtattgccgacagcgattttgtctactcatactggtggatttggcgataatactttcttaaatttaaatagcgaaatgagtaaaattattgctcattggcgggaccaaaagattgattttaaaaatttatacttaggctatttaggtaaagaagctattgatttttggctgagtcatatttctgattttaaagacagtaacgtactgcttgatccagctatggcagattcaggtaaactatatcacggattagacacagactatgtgacaaaaatgcgtatacttgctaagtctgcaacaatcttaacccctaatttaactgaagcttgcctattacttgggaaaaattatcgtgatttttcaattaatgaaattaaaaagcttgctttagaattaaaagaaagattcaaattaaaagaggtagtaattactggtattctaatgaaagaaaaaattaagatggtaggagtatcagctaatgatcaagtatttgtaatcgaaaatgaaaaagtaggacgttcattttttggtacaggagatatgtttgcaagtagcctattagtagcaattttagcaggttattccttaaaagaaggcgtagaaatagctgctacttttattaaaatggcaattgaagtaacagatttaactcaggataagcgtttaggacctaattatgcaggtgctttgccttggttaatgaataaaagtagagaaagaggatagaaaatgcggacaaaagaaaattcactggtttcaataattatgactggcttatttgctgcgataatttatttaggtgtctgggtcttacgaatcccagttccagctttagttggtcgaccattcattcattttggtaataccttaactgctgttgcaattttgtatctaggatatcgaaatggaatgttagcgggaattattggcttaggcggttttgacttacttaatggttatgcagccacctcttggttaacaatgcttgaagtggtgatagttgccagtgtcttaacggcagtatacaaagggatgcactatcaagatagtaaaagaaatattattattttaggaattatcgcggggataactaaaatttttacaacttactgtgtttcaattgtagaagcattgatggttggaactagtttaaatgtagctttagttagctcttttgtgagtttaccggcaacggttattaattcaatttcaactgcaatttgcacgccaattttgtattttgcagtgcgcgatggtgcaaaaagagttttaagaaagagtgtatagcttaaataagtctgctataattttggttaaaaaaggaggaattttaaatgccatttgtacatgtagaattaattaagggtagaagtgatgagcaattaactcaaatgatgaaggatattactgaagctgtgcataagaatactggtgcgccaaaagaacacattcacgtaattattaatgaacttgataagcatacctatggtcaaggcggcgaatggagagcttaaaacaaaaactcgtgattagtaaaataaactaatcacgagttttattttgtaaaaatagctaaagattaatcttcttttttagcttcgtctaaagccttcataattgaagggttctttgagtgacaatcttttaacatttggtaatcttcttcagataatttaacagtgtacttagtcataattttccctcactttttatgtttacctttaatatatcactttcttgagagattgatatagaaattttgaattgaactagattaaatcgatataatagataaaaagtaagtaaaagagtgattaaaatgtttgattatcgaaataacttaaaaagaattttaaataatactgcaggcgatgaaaaaagtcttcaaaatagtttaaacgcaattaaagtggtattaggtatgacaggtgaaggagagtctacaccgtcaagtaataaaatggatgcaaaagttgttgcccaaataaatacttttcttcagggaataactaaattaattgaacgcccaggtgataaaaatgcaaaaagtactgccttaggagcgcttcataagttaacttttgatcatgatattgctgcaaactttggaaagcaattgggattattagatcaagcaattcaaaattcagaagaaacgagtactacagttaatcgaaaaatctttgaagctgcattaaagcctaaaaaagcgaaagcacgtgattatcgaaagggtagacgatatactgttatccgtgcattgaagggtgcagatttgatcaatgataatggggaagttgtctttgaagtaaatgaaggacaaatccatgatttaaatttaaaaagcggcgatattgttgaagcattacctttagcaaatagcttaaatgaagctgaagttttacgagtagttggatatcgaaaattacgcagccgtgattatgacaagatagatgattttaagtatggagtagtacaaggaagtccaggcaatctaagtgtttcacggaatatccatggagaaaaactgattatcaaccataagccagtaatcgttgcgcttgattctagttactatcagaatagaaatattcatttagaagacggtgcaattgttgacttagcttggtatacaggcgatgttagactaaaaaaagatccagcgagtgcagttcaggttcgctggatctatgaaactgagcaacctaggcgagtttctaagactaagaaagaaaagacaaaggcagcggtaagtaaccaagaattagctaagttagatatgaatttacattatcaacgagtaggtattgctgttggcgataatcaaaatgaagcgattttagaagggattgttaaccgctataatggtattccaattccgattgatgcatttgaaggtaagaaaaaagtaattgaaaatcaaattaaagatttagacattgtaattttggttactgcatttgccgctcatgatagtacttggaatattagcgagttcgcaagtaagtataatgttaaatttgctgttagttctagcaagggatatcaagcatttgagcgtgcattatatcgagcagaaaatggaatgccagcttatgaaggaagccaacaactagaatataaaatgttaaaaaacaattaggagtaagcagtgtagctgacaagatgcatgaaaattagataaaatattaataacttatttttaggaaggatgatgaaatgacaaaaaacatcaaaaagaaatcttggatgagttggctagtttttttagctggcttagaaattatcgccatttctattaatttcttctatggtccaattaatattgcagctggtggctcaacgggtatctcgatcttagttgatgcagtatggggtattaatcgatcaattactgttttaattgttaatattttaatgctcattttggcagcaatctttttaggaaaaaagacaacgaaaaacgttgtcttaggtagtttattgcttccaatattaatggaaattacgcctagttttaaaattactaataatcagttactagcggtaatttatggtggggccttaatgggattaggcgtttctctactttaccgcgttaatgcatcaagtggtggtacaacaattccaccaatgattttaaagaaatatttttatattaatccagcaattggactacttgcgattgatatgatcattatttttcttaatatctttgttgacggctggagtgcattcttattagctgctttgtcgcaagtagtgacagccatgactatgaattatgcggaagctggttttgatcgtaaatatcaggtgcgtgtgatgagtaacgagcattttgaagaactaaagacaatgctgcttgataactacaacggtttaacaatttatgatgttgttggaggttatagtgatgatgacaaaaagcagctgttattagtagttgatactcgtgaatatggtcctttaatcaataaaattcacgagattgattctgatgcttttattatcactgacacagttgcgcgtgttcatggcggccaatggggattataaccaagtcttttcgtatatgtcttctttaaagccgcaagctaattttttaccatcggtaactaaaggtcttttgattaatttaccgttttgtgaaagtaatttggctgcttcttcaagcgtcatcttgtttatttggtcttttaagtgcatttggcggtaaacttgaccagacgtattaaaaaaatatcttaatccgcgatcttgaaaatcagttaaccacttaagcagttcctcttgcttaggtggtttttctactaagtcttgatactgataagcaatttggtgatcatcaagccaattttgagctttcttagaagttgaacaacgtttatagccataaaatttaagcatattttttctccttgttataaataattgtaaatttattttagtatttttttagaaattttgatattgaattgctttaaaagagggatgagagtatactgtaagagttgtatttgtggaaacctcacatctgcaaccgcacgtttatggggtaagaagagaattaacgttaattccacctcatacggcgagtctaagtattttttcggaggtgtacaaatgtacgcagttattaaaaccggtggtaagcaatacaaggttgctaagggcgatagcgtttttgttgaaaaacttgaagttaagcctggcgacgaagtaacttttgatgaagttattcttgtaaatgatggtaagtcaactaagattggtactccagtagttgaaggtgctaaagttgttgctaaagttgaaaagcaaggcaaagaaaagaaagttgttactttcaaatacaagcctaagaagcactcacacactaagtacggtcaccgtcaaccttacactaaggtaactatcgaaagcattgaagcttaattaaggggtgaaacaaattatgatgattaacaatcttgaagcacttaaattatttgcccaccacaagggtggtggttcaactgctaacggtcgtaactcagctggtcgtcgtttaggcgcaaagcgtgctgatggtcaaaagatcaacgcaggttcaatcattttccgtcaacgcggtactaagatccacccaggtaagaacgttggtatcggtggcgacgacactttgtttgctttaactagtggcgttgttaaattcgaacgtttgggcagagatcgtaaacaagtttctgtttacccagttgaagaagcaaaataattatttcttttgcagactggacgtccctaaggaacgttcggtctttttttatctactcaggaggtaggttacatgtcttcagatcaagagttgctaactttaattaataatcgaattgataaaactactaaattgattaaagaagaacaagcagatgccttaattatttttaatcaagcaaattatcgtttcttaactaatttttctggtgaagaagctgagcttattctaactgctaatggagatcgagtgttattgtctgattcccgctttaaagatcaaattcgctatcaagctcctggtgaaatgaaggtcgtaatgcagacaatggatgtggttaaagagattgctaagcaattaaaacaattagatgtaaagaatgttttagttgaaggagagtttatttctgcaactcaatttgaagctttaaaagaggcctgtcctgatcttaattttgtcttaagtgctgaattagttgagaaagttcgcaatgtaaaagacgacttagagttggctactttacaaaaagcgattgatatttctgctcaaagttttaaagagatcttgcctttaattaaaccaggagttagtgaaagaactatcggggctaaattagactatttatttaaaatgaatggcggcgatggcccttcttttgaaacaattgttgcttctggatatcgtggtagttgggcacatggcgttgctagcgataagaaaattcaacaaggcgaattgattgtaattgactttggtagtttttatcatggatatactgcggatatcactagaacagtagctttaggacaagtagaaccagaattagaaaaaatatactatattgtattagaagctcaaaagcgcggaattgctgcagcaattgctggaaatactggaaaagatatcgatcaagctgctagaaactatattaaagaacaaggatatggggaatactttggtcatgggattggccatggaatcggactagaagtacatgaactttgtacgccagcaatgccatatggaaaagaagttatgaagaataatatggcaattacagttgagcctggtatttatttgccggatcgcggcggtgttagaattgaagatgacgtgttaattaaggacgatcatccttatgtaatgtcacaattgccaaaagatgagcttttaattctataattttatctaattatgcggttaatgttgcgaaacaatggataagattggtaagataagtaagtgtagaaatgaggtaattttactatgacaatgatctcagttaatgaatttaaaaatggattaactattgaatataacaacgatttatggcgtattgttgaattccaacacgttaagccaggtaaaggtagtgcctttgttcgttcaaagcttaagagtttaagaactggtgcagtacaagaatatactttccgttcaactgctaaggttaatactgctgatattcaaaccaaagctatgcaatacttatacaacgatggtacaagttttgtatttatggatactactacttatgaacaacttgaaattccagaagctcaagttgaaagagaatctaagttcttaaaagaaaacatggtagttaatgtcattatgcacgatggtgaaactttaggtgttgacttacctaacacggttgaccttgaagttgctgaaactgaacctaacattaaaggtgatacttcctctggtggtggtaagcctgcaactatggaaacaggtttagtagttaatgtaccattctttattaatcaaggtgatgtattaactattaatactgctgatggtacttacgtttctcgtgcaaataaataatttttgaggtaaaaatatggctgataattcaacgattcttttatcaagcaatgacaaaggcgatgaaacccgagttgatcttggtgttttagaagttattctaggaattgctgccagaaaagtcgatggcgtcagcgaaatgcgtgggacgctgaagactggcattaatactctttttggtcgttctaaccaaggtaaaggcgtttccttaagtgttgaagatgataagttaactgctgatgtttatgcttatcttgactatggtgtaaatgtgccaaaagtatgcgtcgaactgcaaaaaaacttgactttgcaattgaagcaaatgacagatttagatttaactcaaattaatgttcatgtgtttggtctagtttcagaaacagaagaaactgaatctgaagtaaaggctgacacagaagcacttttcccagacgataaagaggacgaggctaaagactaaatgacacagcatgagatgagaagaattgcaatgcaagcaatttatttggctaaccaaggaaacttgactaatgcggaagaagtttgtcaaaaagcactaaaagctttagagctcaagagctttccagattattctacagaaatagtaaatggtgtcttggctaacaaaaaagcgcttgatgagcaattaagtaaatacttaaaaaagggttggcgtctaaatagaattaacgaaattgacttggcaatccttgaagtggctctttacgaaatgcaaaatagtaaagtgattgaaccagtagctgctttaaatgaagcgttaaatttatgtgatgaatttagctctaaagaatccaaaaagtttgttaatggtctcttggccaatttcattaagaaagactaactaatgagtcggctagttgagccgactttttttgatgaggtgattaggtgaaaaaattactagaaggaaaaactcctgcaaatgagattacagaaaatttgaaaaaagaaataaaaaatttgaaaaatgacggaataaatccaactttatgcgtaatagaagttggagacgatcctgcaagtaaaatttatttgcgagttaaaagaaatttagctaaaaaagtaggtatcaatgaagttggattgcattttccagctgatacttctcaagctgaacttctaggaaagattaaggaacttaatcaagatccaaatattaatggtattatggttcaattaccagttccacctcaaattgatccgagagctatttttgaaactattgctcctgaaaaagatgctgatggattttctccacttaatttaggccgtctttgggaaggacaaagtgatattattccagcaacagttcgtagtattctaacattgattgattattatggaattaagatggccggaaagaatacagtgattattggtcggagcgtaattgttggtaagccactagctgctgttttacttgaacgagatgcaactgtaactattgctcattcaaagactaagaatctggcagatttgacaagaaatgctgatgtaatcatttccgacgtgggtaaagctcatttagtaactgaagatatggtaaaagatggagcagttttgattgatgttggaatgaaccgtgaaaacggtaaattaatgggtgatgtagattttgatacagtagctcccaaggctgatgcaattacaccagttccagggggagttggcccattgacagttgctagtttaatgaaacaagcagtgattttaacgaggaaacagcatggcagataatccagtttacctttctgttagtgatttaaatttttatatttcacaaaaatttaaaaacgatccttatctacataaggtttttttacagggagagttatctaattttagattcagaatgcattcccatcaatatttttcattaaaggacgataaatctaaaattaatgtagttatgttccgctctttttttgaaaagttaaagttcaagcctgaagagggaatgaaagtttatgtaagtggttatgtagatgtttatggaccacaaggctcataccagttttatgcgcaaacaatggagccggctggattgggagctctttatgaacaattaagacagctacaagaaaaacttgcaaaagagggtttgtttaacgaagatcataaaaagcggttgccactgtttccagatcgtattgcagttgtaactagtgcttctggtgcggttattcacgatattatggttacagctaaccgacgatttccgcatgctgaaattgatctctacccagctaaagttcaaggagacgaagcagctgatactattgtagcttctctaaagcagattcaagcgcaaggtgataagtatgatgtagttattattggacgtggtggaggatcattagaagatttatggccttttaatgaagaaaaggttgtacgtcaaatttatgcaatgcaaatgccagttattagttctgtaggtcatgaaactgataccactttagctgacttagttgccgatgctcgtgcagcaacaccaacagcagctgcagaatatgcaacgccaaatttagctgatgtattaactaaaattgtacaattacgcgctcggctttatgcagcaatgcaggataatattcgagctaaacggcagatattagaccgtttgaggaaagccccagttctacaagagccaactagaatttacgatcaacaaattcagcaagttgatatgcttagtcatcgacttaatcaagcaatgtctaaccaacttcagcatgatcgttcaagtgtacgcttacttcaagaacggttaaaggcgcttgatcctggtcgaagactagaacaactagaacgtgagcgaacttttatagttgctaatttattttcaacaatgacagcttatctaaaggatcagagaaataaactaaatcgaaccatgcagcagctagatgacattagccctttgaagacaattggtcggggctacgtttatacaacggatcaggaaggaaatacagttacttctgttgataagttagaaattgatgaaaaattaaagttgcatttcaaagatggtcaagtacaagtaaatgtagaaaatattcggagagaaaaagatggcaaccaagaaaaataattttgaagaacaattaaatgaattacaagaaattgttaataagcttgaaagtggtaatgttcctcttgaagatgctttaaacgaatttcaagctggagttaagttgagtcgtgaactggaaaagaaacttaatgatgccgaacaaacagttgctaaattggttgataaagatggaaatgaaaagacgctcgatccccaaaatgcgtcagctcctgaggaagaataaatgaacttaaaagattttcaaaagaaatatacacctcaaattgataaatttttagaggatcacttagcaagtgaagttgataatccaatttttagtaaaattatgtcatattcagttatggctggtggtaagagattacgaccgctccttttcttggcaacacttgagacattgaactataaaattagtgaatcagaattaagaatcgcatgcggaattgaattaatccatacttattcactaattcatgatgatttgccagcaatggacaatgatgattaccgtcgcggaaagcttacctctcataagaaatggggagaagctgaagctattttagctggggatgccttgcttccattaggaattcaatggattacagaaggtagtaattcagcagctttagctattataatctcacaagcagttggtccaaacggaatggtaggtggtcaatatcttgatattgattcgactaataatgatttagttaaagaaaatgctaaagttattgatcagatggagtggttaaagacaggctgcttaattgaagcaagtgttaaaatggcagctgtttatgctggtgctagcactgatgaagttgatcgtctagataattttagtaagcaatttggcagatcttatcaaatttatgatgatttagttgatgtagttgaaacagaacaagaagcaggtaaggctacacataaagatgctgatgaaggtaaaaacaataccttaactttacttggaattgaagctagccgtaagcagcttttaaagatgattgaagcgggaagagcagctgttaaaatctttaagcagcctttattaggggaattttttaatttatatcagaaggtattatagtaaatggttaaaaaacgtgcagatgttttattatttgaacaaggcctttttaattctcgcagtcaagcacagagagctattatggcgggtttagttaatgaccataatcatcaaagaatcgacaagagcggtgaaaagtttcctgaagatgagacttttcatattaaagatgatgggaaaaaatatgtttctcgtggtggatttaaattagaaaaggctttgcaagtatttaatattaacttgaaagataaaatttgccttgatattggtgcctcaacaggtggatttaccgatgttgccttgcaaaatggtgctaagttagtttatgcccttgatgttggttataaccagcttgcatggaaattacgtgataacccgcaagttgtagttatggaaaaacaaaatttccgctatagtaagcctgctgactttaccgacggacttcctgattttgcaatgacagatgtgtcattcatatcgttagatttaatcatgccgccaatgtatgagattctaaaagatcattgtgatgctgtttgcttaattaagcctcaatttgaagctggtcctgaaaatgtaggcaagcacggaattgttcatgatcacgaagttcacgctaatgttattaaacatacaatgcaaatggctcaaaagattggatttaatgttctcggagtagattattcaccgattaaaggtggtaaaggaaatattgaatttttgattcatttaggtaaagatctagcaaatccaggacaagatttgtggcagggaaatccggctgatgtggttcaacgtgcagttagtggcctttaggtgagaaaaatgttagttgaattagatattaaaaattttgcaattattaagactcttaaagttcgttttcaagaaaaaatgactgtcttgattggagaaacaggtgcaggaaagtcgattattattgatgcagtgtctctcctattaggaagtcgagcacaaagtgagatgattcgctctggtgaagaaaaagcggtaatcacgggcttatttgtgctgagtgaacaaaaagagttaattgaaaaattatgtgaaaagtatggtcttccatttgaagatgatcaattgataattagtcgagaactaacgcataagggaagaaatgtagttagaattaatggtcagctaacaacaattaatgtactacgtgaaatcggtaaaaatttagttgatattcatggtcaaaatgatcaacaaatcttaatggatccagaacggcaaattgacttgattgataattatgctaaacctgagtttaaagacgagttgcaagattatgcagctgattttgaaacatggcgtcatcttacttcgcaattgcgtaaattaagagaagatgcgcaagaaattgctcagaaacaagatattttagaatttcaaaataatgagcttgagagtgccgatttaactgatccagatgaggatgaaaagttagaagaagaatttaatgaattaaataattatcaaaaaattgctgatacagctaattattttatacaattatatgacgatgatgagcatggattagctactttacttggggatgcacaaaatgcagcagaagatctaagtaattatggtaaaaaatttgaaaattttgctactagttttaatgatggcgtttattcattaaacgacgctcgtagtgaattatcttctctaatggatcagatggattttgacgaagagcgatatcagtatgtttctaaccgtttagatactctgaatactcttaaaaagaaatatggaccaactttagaagatgtttttaaatttgcccaaaaagttaagagcgaacttggtaaatttgaaactggagatttggacgaagaaaaaattcaaaaagaattagctgatgttgagaagagactcagcaagaaggctaaaagactacataagcaaagagaacaaattgctcgcgagctagaagaaaagataaaaaaagaattagctgatctttacatggaaaaagctcgtttttctattcgaattaatgaaaccaattcttttacaaaattaggaacagatcaagtaatttttatgattgcgccaaaccctggtgagtctttaatgcctttagtcaagattgtgtctggtggggagcagtctcgtttaattttagctttgaaagcgatctttagtcgtgtagagccggttggaacaatgatttttgatgaaattgatactggtgtttctggacgtgtttcagcagctattggtaaaaaagtgcatgcaattggtcaagaaaaacaagttattacgataactcattcaccccaagttgctgctgctggtgatcaacgctactcagttgtaaaacaagttaaagatggagcaacttatactcaagttggtccgcttactcaagaagaagcaattacggcaattgctcaaatgatggctggttctgatgtaaccgatgcggctaaaagaaatgctgctgatttgatggaaagttttaagaaataaaataaaggacttctcgtatgatgtttaaaaattacatcactttaagaagtcctttatttttatgctgtttcaacattaaagatgtcatttaagtcgataattctaattatattattatcatagctatccagtacaaaacgtccagccgatgttcgtttaattagttgaccgatttctgtttttccattttgataagtgagtaagatgtattctttatgaaagagagcatgctctaaaattctgataattttacctggatcttgtgcaaaagtagtaagcttattaatattataggtaaagaaataattgtagatttgtttgctataattattaagtgattttaataaattcatatctcattcctcgtatatcccgaacttgcgtttgcactatgcattatacgaacaaatgtttttaattgcaagcagaatttatatctctttgcgaaactcttgaaattactcgctttttagtgcaatatattcttgttactataatttttaggagcaaaaatggcacatcaaggtttattattagttctatctggtccttcaggtgttggtaaggggaccgttaaaagtgcaatggttaagcaaaaagctttttcatttgaatattctgtttcaatgacgactcgtaagcctcgtccaggtgaagttgatggcaaggattactattttgtttcggaagatcgttttcaagaggcaattaaagataacgaacttttggaatataatgaatatgtaggtaatcactacggcactcctcttgcacctgttcaaaagatgcttaaagagggcaaagatgttttacttgaaattgatgttaatggagcaaaacaagtgcgtaagttgatgccagatggtgtttttatctttttaacaccaccagatttgcacgaattaaagcatcgaattgttaaccgcggaaccgattccgacaaggtaattgcgatgagaatgaagcaggcacgtaaagagatcttaatgatggaagattatgattatgctgtagttaatgatactgttgctaatgcggttgatcatattaaatctattgttgaagcagaacacgtgcgtgtaccgcgagtaattaatgattatagaaatatggttaaggaggattaacagatgaaaattacatatccatctattgataaattgctgtcacgagtgaattctcgttattctctttcagttttagctgctaaaagagctcatgaaattcaagcaggcgcaccattagctttaaagcattataagtctgacaaagcagttggcaaagcacttgaagaaattgctgctggtaaagttacaattgatcctgagcatcgtgaagatattggctagaatcttttccttcattgttaagcaatgaaggttttttagtaggtgataagttagatgatcgcacaagttattgtagatgtggctgctaagcaaactgaccgcgtgtttgaatatcatattcctcaagaactaactgatgtagcagttggctcaagagtagtcgttccctttgggcggcgaaaagtacagggcttcgttgttggtattagtaaaacaacctcttatacaggaaaattaaaagatttacttgttgtagttgatgaattgccacctcttactccagaattaattactctgtctaaaactttagccgataaaatttttgcgtaccgaattacaatcctgcaatcgatgctgccaagggtaatgagggcaaactatcaaaaaattttagttccaattactgaagaagcaaaaaaacttaaaatttttaaaggtgaaccacttgatttaaatgaagtttcaaatcttaatactattatagaaattaaaaagctaattaaaaataatcaggctaagattgaatacctagttgaaaataaagcaaagaaaaagcaaattgcaatttatcttttgactaaaacgaaagcagaatatcaacagattttaaaaggactaaggaaaactgctaaaaaacagcaggttttattggataatatcgtaaaaaattatcatgagtatccaaaattaggctcaaaaatagtgtctgaattagatgtgtcaagttctgttctaagagctgctgtaaaaaagggatggcttgtaaaaaaagagcaggaaatgtatcgtgatcctttaaaagactttgaacctagaaaaaagaaaattcaaattaagttaaattcagaacaaactcatgctttgaattcgattggaaaaagtattcaaaaaagagaagcaaaaacttttcttcttgagggaattactggtagtggtaagacagaagtgtaccttcatgcaattagtattgcacttgaacaaaagcggaatgctttaatgctagttccagaaatttctctaactccgcaaatggttaagcaagtaaaagaacgttttggagataacgttgcagttttgcatagtggcttatctgaaggagaaaaatatgatgagtggcgcagaattcgtcgtggagaagctcaagttgtagtcggagcaagaagtgcgatctttgcacctttaaaaaatattggcttaatagtaattgatgaagaacatgaatcttcctataaacaaaatgatactcctcgttaccatgctcgagacgttgcattattaagaagtaaatttcataaatgtcctgttgttttaggaagtgctacgccttctttagcaagtcgtgctcgagctcaaaaaggaagatatgaattattacttttaactaaacgtgccaatcaaaaagctttgccaaaagtagatttgatagatttaaaaacagttgaatttgctggagctcagtttgatttgtcgattcctttagtggatgcaattaaagaaaaaatagctaaaaaagagcaggtcattctacttttaaatcgccgaggtttcgctagttttatgctttgtcgtaattgtggctttgtcttaaaatgtccaaattgtgatatttcattaacgctccataaagatacacagcagatgcagtgccattattgcggtcataaagaaccgattccaagaagatgtccaaattgtcaaagtgaaaaaataaggtttttaggtactggaacgcagaaagtacaagaagaacttgagaatttattacccgaagcaaaaattttaagaatggatgttgatacaactagacgtaagggaagttataaaaagatcctagatagttttggagatcatcaagctgatattttattagggacacagatgatcgccaaaggactagattttcccaatgtaacattagttggcgtaattaatgccgacactgctctctcgctgccagattttaattcttcagaaaaaacttttgatttgctaacgcaagtatcaggaagagcaggaagagcagaaaaaacaggtagggtaatgattcaaacttataatccagataattatgcgataaaattagctcaaagtcaggattacgaaagtttttatcaaaaagaaatgcgggttagatttcaaggcaattatccacctttcttctataccacactaattacaattacatcaaaaaatgaacaatcagctgctaaagaagcatttgtgataaaaagaaagttgatgcggcatctacatgccccaacaattattttggggccgacgccaagcagcgtagcaaaaataaaaaatcaatattattaccaaatcttggtaaaatataagcatgagcctaaattgcatgatttgcttcatcagattcaagatgatgcacaattagcgcaaaaacggggtttaaatatatatatagataatgaaccagaaagaataatgtaattaagaaagaagttgaatctatgtcatcagttatttttttaggaacaccaaattttggtagtgttgttttacagggcttaattgatcaaggatatgatgttaaagcggtagttactcaacccgataaacgagtagggcgtaagcaagtagttcatcaatctgctgttaaacaaactgcactaaaacataatcttccagtgtaccagccagctaagttatctggatcagatgagctcgcagaattaatgaagattgaaccagattttattgtaactgcagcttatggacaatttttgccaactaaatttttgaagtctgctaagattgcaccagttaatgttcatggttcactcttgcctaaatatcgtggtggtgcaccaattcaatactcagttttaaatggagataaagaaactggggttacaataatggaaatggttaagaaaatggatgcaggagatatattctctcaaaaagctttaccaattgaagatgatgataccagtggtactttatttgataagttaagtattttaggtagagatttactgctagaaaccttgcctaagtttattgatggaacagtaacacgtactcctcaaaatgaagataaagtagtcttttctccaaatatttctaaagaacaagagcaaattaagttaacaatgacggctgaacaagctaataatttgattcgcgcccttaatccggatccaggtgcatatgtaatgcttgatggcaagagatttaagatttggaaggcgaaacctttagctgagaagacaagttttcctgctggaactttagttactaataaaaagaaatttgtaattagcatggctggtggaagcgaattagaactacttgaagttcaaccaactggtaagaaaaaaatgaatattaaggactacttaaacggccaaggcagtcattttacaagtggagaaaagataatcgatgagtaatgcaagaacagttgctttagaaactttgattaaggtttttaatcaaaagagctattctaatattgctttaaataatgaactagtaaaacatgaattaaaaccagctgataaagctttagctacaagaattgtttatggaactattcaatataaaatatttttagaatatcaattaaaaccactaattaaaaccaaattgcgcgataagtttttaatgccattacttttaatgtctgcataccaatatttttttctagaaaaagtaccagcaaatgcaatttttgatgaagcaaataaattagctaaaaaatttgctaagaaaaatagtggtagctataaactagttaacggaattctacgtgctttagagcgccaaggaaaagttttgccagcgcctgataatttagttgattatttgagtatcaaagagagctttcctaaatggctggtagaatatttattagataactttggtgaagatcagactaaagaaatattggtgcgaagtaatcagccagcggctaactcaatcaggatggctgtagaggaagacaagtttgaagaaatcaaagaagcattgaaaaaagatggttttgattttaaagaatcttgtttaacagcgcataatttgaacctaaataagggcggagtagctcaaactaacttgtttaaggatggtaaaattactattcaagatgcggctgcctcgcttgcagtagatgcttttaagtttactggcgatgaacaggttttagatgcatgtagtgctccagggggaaagactgttcaaattgcagagaaattaacaactggtaacgtaattgctttagatattcatgaaaataaactaagactcgtcaaaaatgctgctaaaagacttcatgttagtgataaagtaaagacaaaggctctggatgctagaaaagctcaagagtattttacagcagggcaatttgataaaatcttagtagatgctccttgttctggtctcggtttaataagacgtaagccagagattagatgtgaaaagtcattaaatgatattaaaaatttagctagaattcagctgtccattttagaaaacataagtggacttttaactgcaggcggagagctggtttattcaacttgcacaattagccttgaagaagatgaaggagtagttaatcaatttttgaaactgcatcctgattttgaattagttccagttcaagtgggaaagcttccaaaacaaaatatggtaagaatttttcctagtgcagatggcagtgatggattttttattgcaaaattaaaaaaacgagggtaagtaattttgattaaaacagcgtttgcttcaagcattggtagagtccgagaaactaatcaggactttgtaaaagtatttaaaaatcaaaataatattattatggggatcgtttgtgatggaatgggtggccatcagggcggcgatgttgcttcaacgatggctgttagccacttaggtcacaattttgaaaagacagattttactgatcctgatttagctcaaaaatggctaactgtacaattgcggttagaaaacgaaactattttaagcacagcagatcgttttgctgatttaaatgggatgggcactacgattgttttggcaattgcttttaccgaaaaaatcttaatcgctcatttaggagattcacgttgctatttgtatggcggaaatgaatttaagcaaatcactgaggatcattcgttagttcacgaattagttaagatgggacaaataactgagcaacaagctagaaatcatcctcaaaaaaacatcattactgaaacattaggtgtttcaagtactgtgaatcctgaatttgatatacttgaagtacatgcaggtgatattttcctcctttgtacagatgggttaacaaactctttaacagatccgcagattcaacagattcttgccactaagaatttaaatttaaaagagcgttgcaataaactgatcaatgaagcaaatcgtttaggcggcggagataatatcactgtttgtttacttgcctatgtagaaaaggatggtgacaaatagcgatggaaaagggccatttacttggtggtcgctataaaatcatttctgttctaggcgaaggtggaatggctaatgtttatttagctgaggacataattttgcaaagaaaagttgctgtgaaagtattacggcttaatttgcaaaaagatcctcaaactattcaacgctttcaaagagaagcactttcaactagtgaattaagtcatcctcatattgtttctattcttgatgtaggaacggaaggagattgccattatttggtaatggattatgttgatggacctgatttagaggaatacattcaacgcaataatccaattcctttgcctaaagtgattaatatcatggatcaaatcttgagtgctgtagctttagcacataaacacaatgtgatccatcgcgatctaaaaccacaaaatattttaatggataaaaagggtaatattaagattgttgattttggtattgcaattgcactaaatcaaagtaccatgacgcaaactaatactgctatgggatcagtacattatatgtctcctgaacaagcacgcggcagtatggctacaaaacaatctgatatctattctttgggaatcattttatataagttattgactggaacagtcccttttacgggagaaaatgcggttgcagttgccttgaaacattttcaagaaaaaacaccgtctttaagagctaaaaatccttcaattcctcaggcactagaaaacgttgtttttaaagctaccgctaaagatccgagagatcgatataaaactgttttagatatgaaagaagatctagatacttgtttggatcccaagcgtaagaatgagcaggtctataagcctcaacatgaccccgcagctgatgaaactatcgttattcctccgttagaaggaagcgtccataataaggatcatgaagtacaggaaaagtcagagccaaaagaagaaaaaaagaatttcttagataacctaaaaggccataagtggtggtggataggtgctttaattgcattttgcgtgattatggtaattctcttttttgctcttggtagaaaagatatggtagatattcctaatcttaataagatgacccaaacagaagctaaaaacactttgaattcttcaggtttagaacttggaaaaattagctatgaatattctgatactgtgcctaaaggaaaagtgattagaactaagcctccaattggttcgcaaataaaagatgggcaaaaagtaaatctaattatttctaagggccctcatcttgtcgagatgcctaatgtaattggtgaatcatatacagttgctaaaaaacaattagttaaattaggtttttcggttgctaaaactgaagaatattctagcagccctaagaatcaagttaatgctcaagatgttgagcctggccagcaaattaatcctgataaagcaactgtaactttgttagtttctaaaggaccttcttcggcgagtagtacccgatctagaagacatacagtaaagttaagagatattgtaggctattctttaaagggtgcccaagattacgctcgtgagaatcatttaacacttaaagttgaagaagaagattcagatgataagaatgatggaactgtcttacgtcaatcgccagaatcgggtactgacgtaagttcaggctctaccttgactgtcgtagtagctaagtctaaaaaggcggatgcaagcagtagctcaagtagctctactacaactacgacggttactaagtcatacaccataaattatccagcagattctagtcaagctaactcgcaaaagacgcctgatcatattcaagtttatgtttctgatgatgaccattcgattaataatatttatcgtgatatgaatattacttctgagcaaagttttacagttccttttaaattaaccaagaaaaatggacatataaaaatattaagaaatggcaacactattttagatgaggacgttaataagtaatgaataaagcacagggaactattgttagcgctatttctggttattacgacgttgaaattgagaacgaagtagttagaactagggcacgtggagtttttagagatcgtaagcaaaagccattggtaggtgatagagtagtagttcaattagataatcaagggatgaattacttaatagaaatactacctcgaaccaatgagattggacgtcctgcagttgccaatgtatcaaaagtattattagtcatttcagcagtcgaaccagatttttcgcttgaattgctagatagatatctaaccttttttgcttggaaaaatgtgggagtagtcatttatttatcaaaagctgatattacgcctactgaaaaattaaaagcaatcaaatgtaagttagattattatcaaaaaattggctattctgtttttgaagatgcagaagaattagaacgtcaattgcctactatgattcaaaaagatcaaatttggactttagcagggcaatctggagcaggaaagtcaactttgctgaataagctggaaaacgaggcaaatcaagagacaggtgcaatttcaacagctttaaaccgtggtaagcatacaacaagacaagttaaactttttaaatattcatctgggtttattgcagacactcctggattttcagcaattgacttattcaaaattaaagttgatgaactaggaaattatttttatgatttaaaagatgcaagcgttaagtgcaagtttagacgatgccagcatataaaagagcctggttgtgaggttaaaaaattgattgaagaaggaaaaatagctaaaagtcgctatgattcctatttaaagattagacaggaaatttctgaaaacagaatgcctgagtatttaaagaaataggtgaaaaaatgatagcaccatcaatcttaaatgcagataatatgcatttaagtcgtgatattaaagcagccattgagagtggcattgaaaggttccatattgatataatggacggccattttgttcctaatttatcttatggtccagaattagtaaaagattttaagcgttcatttccttttactaaggcggaaatccatctaatgagtaataatttagatactacattgccgcttttcgttgaagctggagctgatattctagagtttcattatgaagccacaaataagcctgattactggttagattatctaaaagaccataatgttcgttgcgtaatggcaattaatccttcgacaccagttaataaattaaagccctttttaaacaaattagaccaagttctactaatgactgtgaaaccaggttttggtggtcagaagtttgaagaagcagcagttgaacgtttggctgaacttcaagatatgattaaagatgaaaatctggatttaccaattgaggtagatggcggaatagatcgtgaaactttaaaattaacgcgcgatgctggggctaaaatttttgtcgctggatcttatatttttaaaaatggcagtattgaagatcaagtaatcaagttgaaaaaagaagataaatgaaagcaattgcattattaggtggcccaaaagaagaatggccgcaaaatttagccaataaaataaaattagcacaaaaaaaaggcgccctaattatggctagtgaccggggcagcctttttttgttagaactagggatagttcctgatgttgcattaggagattatgattcattaactaatcatgaaagacaattagtggagagtaaagtaaaagatatgcgctactcaaatcctgttaaggattttacagactcagaaatgctgtattatgccgcatttattgattatcgggtcgatgatctaattgtatatggtgctacaggtggaagattagatcattttttagttaatatgtatgctgtgttaaaagctccttttgaccaatttaaggaacaaattaagtttgttgataaacaaaatattgtgcgcttttttggtaaaggaagacatctaatttcttataattctgactacaaatatttgggaatcgggactttaacagaggtaaaagattttagtattagagatgctaagtatgatttagctccggttgatttgaaggtgccaactatgtattcttcaaatgaatatttacgtcagcaagcagtaacagtttcttgtaaattgggtgttttaattgtaattaatagccgagataaaaaataaaagggatcaagaattaacttgatcccttttatttttttacttcttaattaggcacgtttaaccttaccggatttcaaagcgcgagcagatacccaaacacgctttggcttaccgtcaacaaggatgcgaactttttgaaggtttggcttccatgaacgccgcacggagttcaaagcctttgaacgcttgttaccaaagaccgtcttgcggccagtaataatgtcttttgccatttgtgctaaaccctcctttatttgtgttgtagtacttatctaatttatcacagctttcaaatttgtgcaatattgtcttttcattttcttaaaactaacattgttgatataaaagcttgctgtgttaaaataaattgagaaaaaattgttcttcgttaatggaggaatacgatggctgttaaaattaaaacaaagtatggcttaattgatatttcaaatagtgtgatcgctactgtcgttggtggcgcagcaacttctaactatggtgtagttggaatggcttcaaagaacgctttgcgagatggagcttacactattttaaatcgcgaaaattatcggcgcggtgtagtaattaaaactaatgataatcaaatagtcgttgatgtatatattattgtgggttatggtctaaaaatttcagaagtaagtcacaatgtacaagatagtgtaaaatacaatcttgaaaatcttttaggcattaaaacaaaatctgttaacgtcattgttcaaggcgtaaagattttagacgattaatgcaatctggaggagctaattgtggttttaactgaaattaatagtgatcaattcagagatatggttcgtgcagcaactcatcgcatgggcaaaaatgctgaatttgtgaataaattaaatgttttcccagtacctgatggtgatactggaactaatatgaacttaaccatcgaaagtggagctaaggcagttaatgaaaaccttagtgaatctgttggcgacttaaccgaaagtctctcaaaaggaatgttaatgggggctcgtggtaacagtggtgttattacttcccaactctttagaggcttttataaagctacagaaggtaaaaagaccttaactgcacaagatttagctgatgcttttgctaatggtgtttcaactgcttataaggcagttatgaagcctgttgaaggaactatcttaactgttgctcgtgttgcggctgaagaaggtaaaaacaaggcaaatgaaactgatgatgtcagtgaagtaatgagagcagtagttgatggtgctaaaaaagctttaaagactacaccagatttattgccagttttaaagcaagttggagtagttgactcaggtggtcaaggactcgtatttatttatcagggctttttagaaggagtacttggtgaaaaagataatgatgattatcaacttgatgaaggtgaaatggatgagttaattaatgcagctcaccatcaagctgaatctgcacaagttcaattgtcaacgagtgatattaagaacggttactgtactgaaataatggtcgacttgactgcggacattccaaacaaagagaagtttgaccttgatcaattcagagagcatctttctaatttaggtgattcattattagcagtttctgatggcgaagttgctaaagttcacgttcatactgaacacccaggagatgtctttacttatggcaaaaaatttggccaattaggcaaaattaagattgataatatgcgaattcaacacgaaactatcttagaaaataacgaagaacaagaagaaaatgttgattttgcagttatcgcagtggcttcaggtcacggaattcgtgaactctttaagagtgaaggcgtaaacagaatcatttccggtggacagacgatgaatccatccactaaggatattatggacgcaatcactaagtcaggtgctaaaaaagctattattttaccaaataacggcaatatcattatggcagctaagcaagctgctgaggttagcgatattccagttggaattgtgccaactaagacaatttctcaaggtttaactgcgatgctttcatttgaccctgacgcttcagtcgaagaaaatgttgaagcaatgtctgaagacttagatactgttaaatctggtgaagttacgaaagcaattcgtgatactaagatcgatgatatccaagttaagaaagatgattatcttggaattgttgatggtacaattaaggttgataatccagatctagttgatactactgtatcgatgattgaaaagatgttagatgaagatagtgaaataatcactattatgtatggtagcgatgctactagagaagaagctgatgcagtagttaaaaaactagaagcaagccacgacgatttagaatttgaaattcatgatggtggccagccagtttactacttcttggtatccgtggaataaaatatgaataataagcagagtaagttatttgaaccagtaactgagctaaagggcgtaggagctaaaactgctacggctttagctggtcttggcatcaatacaatttatgatttactattttattttccttttagatatgatgacttagagactatccctcttgatcagattgaagatggtcaaaaagtcttattaaagggaatagtggtaacagatccgtttgttagccgatttggttatcgaaaaacaaggctcagctttaaaatgaaaattgatcatgacataatcatggtcaatttttttaatcagccttggttaaaagataaggttgaatcaggcaaggaagttgccgtttatggtaagtatcaggtggctagacaatcactaagtggctttaagttagtagcagaaaagaaagaatcaggctttgccccaatttattctgttaatcggcatttgaagcaaaataagttgcaaaaattaattgatcttgccttagaggaagttttacctgaagttggagaaacaattccagcagccttacgagaaaagtatcgtctgctttctgaccaaattttagtagaaaaaatgcatcatcctaaaaatggtaatgaagcaaaattagcgcgtagaagtgctatttttagggaattttttctctttcaagtgcagcttgcacagcttctttctcaaagggatgaagatgtgcctggggtagaaaaaagatatgatttagctgctgtaaaagaattgattcaagctattccttttgaattatcagatgatcaaaaaaaggtagttaatgaaatttttgctgatcttcattctccaaggcaaatgaaaagattgcttcaaggagatgttggtagcggtaaaacagttgtagcagtttttgctatttatgccacaattactgctggctttcaagcagctttgatggttcctacagaaattttggctcagcagcatttcgctaaagtggacgaattattaaggcctttgggagttagagttgccttattaactggtgatactaaagaattagaaaagaaagaaatttatcgtgaattagctgacggaacaatcaatgtagtaattggaacacatgctttaattcaaaaggatgtccattttaagaacctgggtcttgtaattattgatgaacaacatcgttttggtgttaatcaaagaaatacattaatcaaaaagggagttgcgccagacgtcttagcaatgacggcaacgccgattccgcgtactttagccttaacagtatatggtgatatggcagtttcagagattcgtcatttacctaaaggacgtaaacctgtggtttcttcatgggcaacgtcgagtaagctaaaagaagttcttgaattaatgcgctcacagcttgaaaaaggttttcaaatttatgttgtaactcctttgattagtgaatcagaaaaaagcgatttgaaaaacgctgaagatctgcaagctagacttgctcattactttaaagatgaaaatgtagttttacttcatggtcaaatgaagggcgatcaaaagaatgaaatcatggatagttttgcagctggaaagattgatattcttgttacgactagtgtaattgaagttggcgtcgatgttccgaatgcaaatatgatggtaatttttaacgctgatcgctttggtttgagtcaactgcatcagttgcgtggacgaattgggcgaggccagacgcaaagtttctgcgtttttgtgagtgatcctaaaactgaaattggtaaaaagcggatgaatataattacatctaccagtaatggttttaaactagcagaagaggacttgaagctacgaggtgaaggagacgtttttggtaaagcgcagtctggtttacctcagtttcaggttggagatgtggtaaatgactataatactttggttacagctcaaaaagaagctcgtgcattagttaaagctgatcctaatctagaaagaccagaaaataaatttttactagaagtgctaaaatataagaaagatttgaataatgattgaaattaaacggagtaagtatgaaaaagattgcaattgatgcgatgggcggagaaaatgcccctaaggccattattgatgctgttttaaaggcaaaacctaaactaaaagatatagaatttattttatttggggatgcagagaaaattaatcaattgatccctaatgagcaaaaagaacggatcgaagttgtcgctacgagtgaagttattgtcgacagcgacgagcctgtaagagctattagacgaaaaaaagactcctcgatggtagttgcagctaactatgttaaagcaggaaaagcagatgcattattttcattaggaaatactggagcactgcttgcttgcggaatttttattattggcagaattaagggtgttgaacgtccagcgctaatgccaacgctacctagtgctaagagtgaacaaggctttaatattattgacgttggtgctaatgcgcagagcaagcctgaatatttagtccagtgggctcaaatggctaacttttatgctcaaaaagttagaaatattcaaaatcctactgttgctttgctaaataatggtgcagaagatgataaaggagatccgcttcatcaagaagcctataagctcttaaaagagactaaacttaactttattggcaacgttgaaggaaatgacttaatggaaggtaaggctgatgtaattgtgactgatggctttactggaaatgctactcttaaagctattgaaggaactgctagtgtgattctacgtttactcaaagattcactcttaaataatggcttacgtccaaaagttggcgccttgcttgctaagccaggattaactgccttaaagaaaagatttgatacagcgagatacggtggtgcggttttattaggcgttaatgcgcctgttgttaaaacacatggaagatctaatattcggcccatctactacactttgttacaaattgataaaatgcttagtcaagatttagttggtgaatataaaaaatactttagtgaatctcgctagactttaataaaaaaatgccttagaattaaactaaacttttttggaggttaaagaaatgaccgaagaggaaatttttaataaaattgctgatatgatttcagaacgttttagcattgatcgtgataagatcactaaagatttgaattttcagaatgatttagatgcagattcaattgatttcgttgagttagtaatggatcttgaagatacatttggagcagaaattccagatgatgacgcagaaaaattacaaactgttggtgaagcagtagagtatattaagaatcaccaaaattaaaattttaatcattgaaatttcagaagatactgtcatttttcatttacttttataaaagttattgaaatagcagtatcttttgtttataataatgacattaaattgaaaatctaattgacttttaataatgtcgtaaggtttgagaggagaatggcctttggaaaagcaaagtgatcttttattagatatcgaacacttgcataccgcatatcgtttgcacggtaagttttatgatgccgctgatgacattaacttaaccttgaaacgaaatgagatcttggcagttgttggtgaatctggttgtggtaaaagtacaattgcttcaagcattattggtttgtatgaccacaaaaatacgagagtaaccggagatatcttgtacaatgaattaaacttagttaacttaaatgaatcattgtttaacaaaattcgtggaaacaatattggaatgattttccaggatccattggcatctcttaatcctttaatgaaggttggagatcaagttgctgagacactttactaccatactgatatggacgagaaagctcgtcatgcacgcgtaattgagctctttaaccaagttggtatgccacgtcctgaagaaatgtatgagatgtatccacatgaattatctggtggattgcgtcaacgtgtggtaattgcgattgcaattgcatgtaaaccagaaatcatcattgctgatgagccaactacagctttagatgttactattcaggcacagattttggatttacttaaggaaattcaaaaagagtcgcgttcaggaattattttgattactcacgacttaggtgttgttgctgaaaccgctgatcaagtggcagttatgtatgctggacaaattgttgaaaaagcagatgttaaaacaatttttgaaaatccacttcatccatatacacgttcacttcttcattcaatgccacagacagatgatgaaagccaagatcttcacgtgattcatggaacagttccttcgctaatcaatatgcctagaactggtgacagatttgccgcaagaattccttggattccagctagtgctcatgaagagaaccctaagattcatgaagttgaaccaggacactttgtaagatgtacttgctggcaaagcttccatttccaagatgaagaaaagaaaggataggaaattatggccgatgaaataatcgaaataaaaaatttaaaagttcactatccaattcgttctggcttctggaatagagttactggatatgtcaaagccgtagatggaattaatctttctatcaaagaaggagaaacttatggcttaattggtgaatcaggttcaggtaaatcaacaactggtaaggcaattgttggggttgaaaaggtaaccagtggacaaattttatacaagggcgttgatgtaactaaagcctcaaaccgtaagagacttaactataacaaagatgttcaaatgattttccaggattctatgtctagtttgaaccctagaaaacgtattgaagatattattgctgagccaattagaaacttcgaaaatttaactactgatgaagaaagaaagagagttcaggaactcttagatatcgttggaatgcctagtgatgcaatttataagtatccacacgaattctctggtggccaacgtcaaagaattggtgtagcacgtgctgttgctactcatcctaagcttattgtggctgatgaaccaacctcagccttggacttatcagtgcaagcacaggttttgaactttatgaagcatattcaacaagaatacaatattgcttacctcttcatttcacacgatttaggtgttgtaaagcacatgtcagaagacattgcgattatgcaccgcggacgctttgtcgaaataggtaaacgtgatcaaatttacaagaatccaatgcatatttatactaaacgtttactttcagcaattcctgttgttgacgttgaacatagagaacaacacaaggaagagcgtcaacgtgtagaaaaagaattcttgcaagatcaagacaaatggtacgaaaaagatggtcgtgtcttaccacttcaaaaagttggcgatcgtcatttcgttgcattgcctaaagaaatgattaagcaagaattgaaggagggagaataggtatgtggaaaacggttttacgtcgaatcctgattatgatcccccagttacttatcttgagtttactagtctttattttggctaaaatgatgcctggtgacccatttactggaatgattaatccgaattcagaccctaaggaaattgcaagattaagacaagaatatggattaaatgatccagtttgggtgcaatatactcgctggctaggaaatatgttccatggtgatttagggcaatcatacattcagaaggttccagttacttctttaatttgggatcgtgcagttaataccttctggttgtctttaatgactgttgttttaacttacttaatcgcaattccattaggtgttacagcaggtcgtcaccaagatgaatggcaagatcacggtgtacaaatatttaactacattacttacgctgtgcctccgtttgttttctacattttaggtatttggctatttggatttacattaggttggttcccaatttctggttccgttagtgctgatgttaatccaggaactttggcttacttctggagtaggttctatcacttgattttaccttcaattctttgtgctttgatttctactacagcaatcgttcaatacttgagaactggtattgttgacaacaaggttgaagattacgtaagaactgctcgtagtaaaggtgttccagaaaatgttgtctttaataaacatattttaagaaactcacttttaccaatcgctgctttctttggtaacactattactggtttattgtcaggttcaatggttattgaatcagtctttagttaccctggtatgggtaagttgttcctagactctattggacaacgtgactatactactttgacagccttaattttattatttggtgtgttaactttaattggtaacttattatctgatattatcatgagtatcattgacccaagaattcggatcaagtagggaggagtagaaaattatggctaaagataaaaatacatcgaaaaaagatcaaaatgctaaaacctctctaccaccatctggatttaagattatcgttcgcgaggtttggcgtgataaggtagcatttgcttcattttgtattatcgttgctatcttactatttacttttgttggctcattgttcctaaacaagagccaagtaacagaaattaatattgctgaggcatattatggatggggtgaatcaggtcacatctttggtactgatgacggtggtcgtgacatcttgaagttattaatgatgggtggacgtaactctattttaattggtctatctgttactgtactttgtgaaggtgttggacttttagttggtttattctctggttactttggtggagttactgatgcagttattatgcgtattgtagactttatccaaattttgccacaattcccaattatcattgttttgactactgttattcctaactacaatgccggaactttagtattattaatttctatgtttggatggacatcgactgctagatacttccgtgcctttgttctttcacagagagaacgtgagtatgttttagcttcaaagacttctggttcgtctaatttaacaattattttccgagaagttttgccaaacattacttcagcgttggttatcgatgtcgtattgatgatcgctggtaacattggtattgaaactaccctatctttcttgggatatggactaccaactactacgccatcacttggtactttaattggatttgctaacgacccagttaacgttactactcgtccatggttatggatgccagcaacatttttattgctaattatttcattgagtattaactacgttggtcgtgctcttcaaagagctggagacgctcgtcaacgtgaaaattaaatttaattgtatcaacattaaaaagcaactcataattgagttgctttttttgtatatatagctaaaaatgcagctaatatactaatttatttatttaaataatgggcataagcttaatttttgactttgaaaataaaatttttatggaattgataacaattgcttaacgttgatatatcaagatgtgtggctgaaaagaataaattaaaatgaagaaatattaaaattaattgagcaaaagcgttgtattatgagtttgatgatgatactattaaaccatcaacttgtcccaaatagatggaggaatataactatgaagaaagccaaactatttggaagtttaactttactttctggtgttgctttaacattagcagcatgtggtaacaattcaaattcaaaagtagataacccaactaagagttttaaagaagctactcctaagaaggccgttaagaagggcggtactgtaagtgtagctcttgaaactgatactccaattaccggtatctttttaaatgaactttaagatactcaaactgactctgatgcaatggctcctggtaatgaagctttatttgatacaaatgatacttatcaaattaatgataagggacctgctaccttaaaattagataataaaaataaaactgctactatcaccgttaaaaaaggtgtaaagtggtcagatggcaagcaagtaactgctaaggatattgaatattcttatgaaattattgcaaataaagcaacaaaatcttctcgttatactgaatcacttcaaaatattgttggtttaagtgaatatcacgatggaaaatctaacactatttcgggtattgaaatgccagatggtgaaaatggtagaactgtagtacttcactttaaggaaatgaaacctggtatgaagtttagtggtaatggttatttctgggaagctgcagcaccataccattacttaaaggatgttccatttaataagttacaatcctctgatcaagtaagaaagaacccactattctttggcccatataagatgagtaaggtggttcgtggtcaagccgtaacctttgtacctaataagtattactggagaggtactccaaaattggataaagttactattcaagttttgaaccctaactctgcttctcaagctattaagagtcacaagtatgatattgcgggtgttgttaactcgcaatggaagaatgtggctaataccaataacgttaactggattgcaaatattccattagcttacagttacttaggctttaaagtaggtaagtgggatggagctaaaggcgaaaacgtaatgaataaggatgctaagatgaacaataaatcattacgtcaagctattgcttatggtatgaatgtttctgctgtaacgaaacgttatactaatggcttaactttccatattccaactttaattccaaaacaatttggtaaatattacgataagaatgttaaaggttacgactacaatatcaagaaaggtaatgaaattcttgataaagcaggctacaagaagaagggtaaatatcgtgtacaaccaaatggcaaacctttaactattcgtttagccgctatgactggtaactctacccaagagccaatcattcaaaactacattcaacaatggaagaagttaggcttgaatgttaagttaactggtggccgtttgatggaaatgaactccttctataacaaggttcaaaatgattctaaagacgttgacatgttcatgggtgcatggtcattatcttcagaaccatcaccaaatgacttgtacagtgtaaaggctccttacaactttactcgttttgtaactgctaagaatactaagttacttcaggaaatggattctgaaaagtcatttaacacaaactaccgtgtcaagaagttccatgaatggcaaaagtacatgaatgatgaagcttatgttgttccagtatctaacagttacaatgtaaatgctgttaacagcaagattactggttactcattgaaaccttcagctgccaacagtctttggtacaatgttggaattgcaaaataacaatttaaaaaagattttcgaaaaggtcgtcaagttgacgatcttttttgtgatttgttaaaaattttttcagtgctaaaattaaatatatcaacttgtccaatattattggaggaaaatttaatgaagaaaggcaaattaattagcacattaactttgctttcaggtgttgccttaactctagcagcctgtggtaataacaatcaagatacgagtcaccctaattttaaggagtatactcctaagaaagcaattaagaatggtggtagcgttagtgttgctgtagttacggatacaccttttacaggaatttttaacgatgagttatcgactaacaataccgactcagaagttatgcaatatggtgatgagtcattgtttgcaactaacgacacctataagtatattaaaggtggagctgctgatattaagattaataaaaacgcaaaaactgcaacaattactattaatccaaaagttaagtggtcagatggccagccattagttgctaaagattatgaatatgcctatgaaattattgctaacaaggcaactcattctcaacgttatacgtcaagtttggctgaacttgaaggattagaagaatatcatgaaggaaaatctgatactatttctggtattgaaatgcctgagggtgaaaatggtcgtacagtagtacttcactttaaagaaatgaagcctggcatgaaccaaagtggtaatggttatatttgggaggcagctgctccttaccattacttaaaagatgttccgtttgacaagctgatttcaagtaataaggttcgtaagaatccattgttctatggcccttacaaggtaaataaggttgttcgtggacaatcagtatcatgggttccaaatgaacattattacaagggtaagccacacttaaataagattacagcttcggtaattacaccagcttcagttgctcaatcaattaagagtaataagtttgatgtaactcaagtaagtaattcgcaatggccaaatattaaaggaactaagggagtaaacttcattgcaaatattccactttcatattcttacttaggcttcaaagtaggtaagtgggattcggctaagggcgaaaatgtgatgaacaaggatgctaagatgaataacaaagcattgcgtcaagctattgcctacggcatgaatgttgatcaagtttacaagagatattcatatggtctttcatttagaattcctactttaattccaaagcaattcggtgattacttcgataaggatgttaagggttatacttataacattaaaaagggtaacgaattacttgataaggcaggctacaagaagaaggggacttaccgtgttcaaccaaatggcaagcctttgactattcggttagctgcgatgactggtagtaaggttcaagaaccaattattcaaaattacatccagcaatggaagaaattgggcttgaatgttaagttaactagtggtcatttgatggaaatgaactctttctatgataaagttcaaaatgactctaaagacgttgatatgtttattggtgcatggtcactttcttcagaaccttcacctcaagatttgtatggtactaaggctccatttaactacagtagatttgttactaaagaaaatactgatttattaaacgatattgattctcaaaaagcctttaataacagctacagagttaagaagttccaccaatggcaagcatatatggacaaggaagcttacgttgttccagtttcaaatagttacagtatttatgctgttaacaacaagttaactggttattcattagctccatctaagagtatgggtggcggattccctaactggtactacgttggttatgctaaataaatcaaataaacaaaggtgcgactgatgatcgcgcctttttctttagctttttttaatagcagaaaataggtataattaaagggttaaagaaaggaagcaactatggtttcagtagcttttaaaaaaaacttaaaagaaaaatacggaataaagtttaataacgaaaatttacttgaagatgcatttactcattcttcttatgcaaatgaacatcctggaagaaaagattatgaaaagctagagttcttgggggatgctgttcttgaattagctgtatctgattatttgtatcggcattttcccagattaaatgaaggcgaattaacgagaatgcgttctaatattgttagaactgagggattttctgaatttgcgattgaatgtggtttccctgcagaaattaatctgggtaaaggagaagagaaggctggcgctagaaaacgtaagaccttacttgaagatgtctttgaggcctttaatggagccttgttcttagatcaaggaatgccagctgtacaacattttttgcatttaacagtttatcctttgattgccgaaggagattttaatgcttcacgtgattataagactgagcttcaagaacgtctgcaagtaaatgggccagtgaagattgaatatcaagtaattgccgaagatgaatcaaagccatcctttaaagtacaattacttgttaatgataaaaagatttctgaaggacaaggccgcaataaaaaagctgccgagcagcaagcagcacaagctgcattagataaaaataaataagaaaaggtgagtctgtgccactacaacaattagttttaaatgggtttaagtcttttgctgataagacgacaattagatttaataatggtattacgggaatcgttggtccaaatggtagtggaaaaagtaacattactgaagcaattcgctgggtaatgggtgaaggttctgccaaatctttacgtggcgaaaatatgaaagatgttattttcgctggtagtcaaatgcgtgcgccgatgaatcatgctgaagttgagctggtttttgataaccgtgaccatcaacttgcttctgatgacgaagaagttgttgtaactagaaaaattttgcgtaacggcgaaagtgattatcttttgaatcatcatcccgtaagattaaaagatgttaggaccctttttattgagtcggggatgtcctctgacagtttgggtattatttctcaaggaaaagttgacgagattcttaattctaagccgcagcagcgtcgcggaatttttgaagaagcagctggtgtgcttcattttaagcaacaaaaagaaactgctttaaaacaattagataagaccaatgccaacttgattagaattaatgatttagttaaggaattagaaggcagaattgagccacttcatgagcaaagttctttagccaaggaatataagttccaaaaggaacaattagatcataagttgaaacaacttttaggcttagaaattgaaagtctaaatgaagagaaaaaagatgttgctaaaaaagcaaaggctaatcaggcaatacttgataagttagacgatgaagttaagcagtcgcaggctgacttagaagaaaaacgtaaacaatcaaatgaacgtcatgctgaaaaagatgaaaagcaacaagaattattgtctttaacgcaaaaacttgctgcccttaatactgatcttcagatgcatcaacaatcaagagaatatgatgttgctacccagaaagaatataatgcgcaggctgaagaattaaaagaacggcaaaaacatttatctaagcaacttacagctaatgaagaagatctaaagagtcagaatcaagttcttgcagagtttttaaagaaacaaaaggaattaaagcaggagcttaaacaaggaccagagcaattaaataatcaattagagaaagttcgatctgactatattcaaactttgcaagatcagactagcaataataatgaaattgtttacctaaaaaatgaattgacgcgaagccaaaactcaagcaataatcgtcagcaagaggttgaagagcaattagcagcaacgcaaaaagttcttgcagaactaaagaaacaaggacatgatcttgttttaaagcgtcaacaattaaacgaaactattgcgtcccttgatcaaaagatcgctcaagcaagtaagcttaaagatcaaaatgaacaaacgtatttgagtgttagaaataagttacaacagatttctgcacaagtagaagggctaaaacgaattagagatcgccatgaaggttattattacggagttaaatacgttttaaaccatcaaagtgattttcatggaattgttggtgttattggcgagttaatttctttcccagctgaattagaagcagccttatcaactgctttaggcggtggagtccaagatttagtaactattgaccagaatagcgcaagagatgcaattaatttgctgaaacaaactcgaagcgggagagctacctttttacctctagatggcttacgtcataatgaaattgcaacttctacattaaattctcttcaaagcatcgaaggatttaaaggcgtggcagcagatttagtaactgctaaaactaaagttaatatttcaaatgcaatttcctatcttttaggaaatgttttagtagttgatactattgatacagcattacgtgttcaacgccgaattggtcgttactatcggatcgttactttagacggagatattattagtcccggtggaagtatgacggggggaacgagaaataccagaaataattctccacttgcaacgaatgcagaaattgataaattaaccaaacaagttaaagttggtaaagaaaaatttgctgaattagaagtgactttgaatgagctaaatcacaaattatctgatttacaaactgaattagcagccaaaaatactgaattgagttctttaaatcaaaagattagtgaacagacaattaagtatgagaatgaagaaaaggaagtaaagcggttaaaacagttaaacgatctacaacaaaaagctgagcttgagaaaaagcaagaagaagctgaacttactggtcgtcttgaaaaggaacagactaaaaaagttcaacttgaagagctagctcaaaaacaaagatcaaagatggatcagttaaagcatgatttgcatgattttgatgaagcttatcaaaaacttcagactaaattaagtaacttaaattctgacttagctgtagtcaagaacaagcttgaaaatcttaatgctaaaaaagcagaattagctgaacaattggtaaacactaattctagacttaaagatattgatgaaaaaattaaggctcttgctttatctcagaatggtcaaagtgaatctgagatagaagaacaagtcgctaaattaagtaaaaagaaaaagcagatgcaacaggctttagctgaaataaatcaggatttaggtaaatttgatgcccagataaataatcttgatcaagtagcaactagaaactataacttacgtaaaaacacagctgctgagcaagaagaatattctgcaaaacttggagaattaaaatctcaaattaaccaaaaacttggtacgttgagtgaagagtattctttgacatttgaagcagctttgcagttgtctaagggacaaaatacaacagaattgcgtaaaaagttagaacgtgaagttcacttacataagatgtcattagcagatatcggcgaagtaaatctgaatgctattgaagaatatgaagatgttaaaactcggtatgatttcttaaatgggcagcaaactgacttattaaaggctagaaaagatattgaggaatcgatgtctaaactggatgacgaagtaaagaatcgctttagtacaactttccatcaaatagaaaagagcttttcaaagatctttccaattatgtttgacggaggacatgcaagattagaactaactgatcccaagaacttgcttgaaacaggaattgagattattgcccagccgcctggcaaaaagtcacaaaaattaactcttttgtctggtggtgaaagagccttaactgctattaccttgctatttgcaatgttacaagtcaatccggtgccattctgtattttagatgaggtagaagcagctttagatgaaacaaatgttgatcgctttgctcaattcttgaatcactatgatatgaagactcagtttattgtaattactcaccgtcgtgggacaatgcaaaaggcagataatttatatggaattgtaatgcaggaatctggtatttcaaaggttttatcggtatcattaaacgaaattaagaaagaagtgaattagcagtgggattatttgataagattaaaaaatctctttttggtcataaggatgaagaccaagaagagaaagaagaacataaagtagatgaagaagcgactaaggaaactcaagattctgaaataaatactgaaactgaagtatctgaaaatgagtcagacctggcttcaaaagaaactaataagaccgataaagaagaaactgaaagctctgacgaaactcctggctggagtgatgctggtagtgcttttgaagaaagtcaaaatgaagtagcagaaaaaacagccgaagctgaagatacttcctcagaagaagagcaaaaatctgaagaatatgaagataagatttcagagtctgagacaggaactgaattagctgcgaatactgaagaagaatccgatgaaaaagtagctgaaaaagaagatgagcaagagcgatatgataagggtttggaaaagacgaaccattcttttggagctcgtctgaatgcatttttcgctaagtttagaacagttgatgaagacttctttgatgaccttgaagacttattgattgaatcagatgtcggttttgaaactgctgaagaattaaccgattctttgagggatgaagcaaaacttcaaaatgctaaaagtcatgacgatttaaaacaagtcattgttgaaaaattagttgatatttatgacaagggcggcgaaggcgaagattcaaaactagctgatgatccagatgcaaaaccaaatgtctacttgtttgtaggggttaatggtgctggcaaaacaacgacaattggtaaattggctaagagaatcaaagattcaggtaagtctgtcatgatggtagcagccgatacttttagagctggtgctgtagagcaattagttgaatggggacgacgtgatggcgttgaggtagtcactggacccgaaaaagctgatcctgcttctgtagtttacgatggtgttaaaaaagctaaagacagaggaatcgactttctattagttgatacagctggtcgtcttcaaaataaagtaaacttaatgagcgaacttgataaaattaagcgtacaataaagaaaattttgccagatcaacctaatgaagttcttttggttcttgacggttcaactggtcaaaacgcattgcttcaagcaaaagattttgataaaactacaaaacttacgggtctagttttaaccaagcttgatggttcatctaaaggtggagtagttttagcgattagaaatgaaatggatttaccagttaaattagttggtttaggagaaaaggttgatgatttagcaaactttgacgcagaaaaatttgcaatcggtctcttccaaggattaatctaatcataggtgaagctataagtaatataaaaggagtaaataatgaagcatttaagtgcatgtacaactatcttagttggtaaaaaagcctcaattgatggctcagtaatgatttcacgtaatgatgatacagcaggtgcaattacaccacaaaaatttattattgaaccagctgctcatggtgaaaaaggacgtaaaattaagtcttggcttaataaatttgaaatggatcttcccgaagatgctcaacgagtaccagctgttccaaacgttgactataaaaaattaggttactatgacgaaagcggtattaatcaaaaaaatgtcgccatgtcatgtactgaatcaacttatggtaatgaaagaactttagcctttgatccattagttaaagatggcttagatgaagattgtatgcaaactgtagttttaccatacattgattctgctagagacggtgttaagcgtcttggtgttttaattaagaaatatggatctcctgctgggaactcagttttatttggtgataaagatgaaatctggtacatggaaattgttactggtcaccactgggttgctcaacgtattccagatgattgttatgcagcaacaggtaaccgtgtagctatccaacaagttaattttgatgatcctgataactttatgtggagtgaaggaattcaagaatttgttgaaaagcaccacttaaatcctgaccacgaaggttggaatttccgtcatatttttggaacatatactgaacaagaccgtcactacaacactagtcgtcaatggtatattcaaaaacttttcaacccagaaattgaacaagatcctgaagatccagatattcctttcattagaaaagcttctaagaaattagctaaagaagatattgaatttgcactaggttctcattatcaagatacgccatttgatccatttggtcatggaactgaagaagaaaagcaccgttaccgtccaattggattaaacagaactcaaaactcacatatcttgcaaattagaagtgatgttcctgaagaaatggcgggtattatgtggttatgtattggtggaccaacatttactccatatattccattctttgctaatatgaatgaaactgatccatcatttaacaatacttcaatgacttacaacaaagaagatgcttggtggtattacaagtctcttgctgctttggttgaaagtcattatccacaatttgttcaacttgacactaaataccttgaagaacttaaccgttattaccgcggtagagttgaagagattattgagaatgcccaaggtttgaatggtgaaaaattaactgactacttaactcgtgagaatcaaaagactgttgctcatactaagaaagacagtgaagaattgatgggtcaaatgttcacggatgctattaagatgtctaagttaacatttaagatggatccaaatctataattttagatcattagctaaagaaggttaggcgataataggtgcctaaccttcttttttgaaagaaataagctaaaagttgatttaaaagtacattgcttttattttagaaaaacattttttttgctatacttgttcaaggtgaggcaaaatggatgaacttgaaaaaaatgaaagattaggcgacttatttgcttactatggtccattattaactaagggccagcaagattattttgaggattattattataatgatctatctttaggtgaaattgctgataatcaccatgtctctcgtcaagctgtttatgataatttaaaacgaagcagtaaggctttagaaaagtatgaagataaacttcatatgaaacgtgattataccagaatagaagaaaaaattactgaagcagtgtatgaacttgaacatggcaaaattaaccgagctcagattgaacttttaaaattattaaaacaaatgggagtagaatagtatggcttttgaaaatttaagtgaaagacttcaaaaagcattaaaaaatttaacaggtaaagggaaaatttctgaagctgatattaacgatgcaagtcgtgaaattcgattggctttactagaagcagatgttaacttcaaagttgtaaaagactttattaaaaagattaagaaagaagctttaggtaaagaagttcaagaaagcttaaacccgggacaacaaattatcaagattgttgatgacgagttaactaagatgatgggagaagaggctgtttctcttaataagtctcaacatattcctaccattattatgatggttggtttgcaaggtactggtaaaactactaccgttggtaaacttgcaaattatctaatgaaaaacgaaaaagctcggcctttgttaattgcaggcgacatttatcgtccagctgcgatcgatcagttaaagcaaattggtcagcagttaaatgtaccagtttatagtgaagacaatcaagatgtagcagagattgtcaagcatggtcttgaagaagcagataagaataaaaatgattatgtcttaattgatacggctggtcgtcttgaaattgatgaacagttaatggatgaattaaaacgtgtaacagctgttgctcatccagataatactttacttgttgttgatgcaatgaccggtcaagcagctactcaagttgctgaaggatttaataatgatttagatttaactggtattatcttaactaaacttgatggtgatactcgtggtggtgcagctctttcaattcgtgctgttactgggctaccgattatctttactggacaaggtgaaaaattaactgatctttcaactttccaccctgatcgaatggcgtcacgtatcttaggtatgggggatatgctgaccttaattgaaaaggcccaacaagactatgacgctaaagaagccgaaaaaatggctgagaagatgcgtgaaaatacctttgatttcaatgacttcattgatcaaatggatcaagtgcagaagatgggcccattagatcaaattattaaaatgattcccggcttaggaaataaccctgctttaaagaatatccaaattccagaaaaacaaatttctcatattaaagctattgtttactcaatgactcctgaagagcgtgaaaatcctgatattcttaatccatcaagaagacgcagaattgctgctggttctggtagatcaattgccgaagttaaccgcatgattaaacaatttaagcaatcaaaagaaatgatgcaaaagatgactaagggagatatgggcgaatttgctaatttgccaggcatgaattcaccaatgggtaagatggcaatgagatcaatgaataaacgttttaagaaaaataaaaagaagcgcatgaagaagattaaacgctatcgctcaaaataatttttaactgttaaggaaaaacactttacacttatttggctttatgctatattatttaagtcaagaaatttaggaggaattaattaatgtctgttaagattcgtatgcgccgtatgggctcaaagagaaaacctttttatcgtatcgtagttgctgattcacgtatgccacgtgatggtcgtttcatcgaagaagttggttactacaacccacttactaatcctgatgaagttaagcttgaagaagacaagatttttgaatggcttgaaaaaggtgctcaaccatcagatactgtaagaagcttactttcaaaagctggtttgatgactagataccacgacgcaaagtacggtaagtaatttactattgcaacttagaagtttgggaaagcttttcccaaactttttttattagaaagaacaagtacaatgactgagtattttgaagttggaaagatattatctcctcatggcttaaagggagaagttaaggtaaatgcgacaactgattttcctgaggaaagattagctaatgggagcagattatttattaagaatagtgatcagtaccaagaattaattgtagatggtgcgcgtcgtcataaacagttttacttagttaaatttgaagaaattgatggtatagatcaagctgaaaaagtttgtggtaaagaattatatgtagcagaaacagatcaacaagaattacccgagggtagctactatttcaaagatattttgaattgcccagtctatgatgctgaaactggtgaaaagcttggagttttagcaaacattgaaacccctggtgctaacgatatttgggagataaaaccagaacatggcaaaagtttctggattccaaatattgaatcagtcgttaataaggttgatctagctaataagagaatagaagtaactttacttgagggattacgagatgaaaattaatgttttaaccctattcccagatatgtttacgcctttgcaagtatcaatgttaggaagaggattagaagataaaaaatgggagttaaatttagttaatttccgcaattttactacagatgtccaccatcatgttgatgacactccatatggaggaggggctggcatggtgttacaaattatgccgataaaaaaagcattggattctttaactaataaaggaaaagtaattattacagctcctcaaggaaagacttttaatgaaaagatggcgcaagattggtctaaagaagaaaatctaacatttatttgtggccactatgagggatttgatcaaagagtatatgacttagctgatgaaacagtttcgattggtgattatgtccttactggaggcgagttaccaacgatgagtatgattgatgcaactgtacgtttattgcctgggattttaggaaatgctgcttccccagttgaagaaagtttttctcatggacttttagaatatcctcaatatactcgtccggctgattttgaagggcaaaaggtgcctgaagtgttaacatctggaaatcatcaaaaaattgctgaatggcgccataaagaagcattacgtgcaacctatcttcatcgtccagatatgttagctgaacgaatactaacagatgaagaaaagaagatgcttgaagaaattaaacttgaaaaagagaattagtatttacaagtttttttctatttggtaaactagtcgttgtggcataagccacttatttatgggtattccgctggcactgagtgttgatgaatgccgtagaaggagagaaaataatggatccattaattcaagaattaactaaagaacaattacgtgatgacatgcctgatttccgtgcaggtgatactgttcgtgttcacgtacgtgttgttgaaggtactcacgaacgtatccagatgttcgaaggtgtcgtaatcaagcgtaagggtgctggtattagcgcaacttacactgtacgtaagatgtcatctggtattggggttgaacgtactttcccagtaaatgacccacgtgttgctaaagttgaagttcttcgtcacggtcgtgtacgtcgtgctaagctttactacttacgtgaacgtcatggtaaagcagctagaattgctgaaaagcgtcgcggttaattcgattaatcaaaacaatattaagagctatctcgaaagagatagctttttttgtataaaaaataagagtttcgaaaatgaaactcttaattattaataaaatgtaatatgatttaatggccagtaccgcatttttactacgccaacaattttgcttctcggaattgttccgatgtaacgactatcttttgaaacgcttctatgatctcccattacaaaataagtattagcaggaactttgttagttttctgcatctcttttagctgcttagaggtatagaattggcggtaatcttgtgttttagctaaagaactgagggtaaagttttgggtattggtatatttagtaccagaaatgccatcttcaccattgtcaattagtttttgaccagccttcaaccaaggttggttaatttttttaccattgatatagatttgattatttttacttacaacggtatctcctggtagtccaataactcttttaatataaagagctccaggctcatcaggagcatcaacaattacaatatcgccttgtttaatcttagcatgccgaagtgcaataacacggtcattattttcaaaagttggctgcattgaaattccagatactgttaaattagcaaaaacaaatttatttagtacaaagaatataccaaaaaatatcgctactaaaattagtacttggagaatccactgcccccaactttcagtttgttcttgttttttcaattttttcaccttatttaatctatttcatcataaagtgtaaccttaaatttgcattttgtcgattaaactaaaaataagagagaaaaaatagaaaagtaataaatctccaaaaggtttgaaatgataatttagcttataataaagtaaactgcaaattaaaaggagggcacataatgaagacagtgcatgagtactcagcaggcagcattatctatagaattaataagaatgaaatagagtttttactagttcaaagcatgctaaatcgtacatggggctttcctaaaggacatcttgaagctggagaaaataatgtacaagcggcaaaaagagaagtttatgaagaagttggattaaggccaaactatgattttagttttgaagaaagtcttacttataaaatagctcgtgatcgtttaaagacagtaactttgttcttaagtgaatttattccgagtcagaaaattaaattacaaaaaagtgaaataggtgcttttaaatgggtaaatttagaagcggctagtagttgtttgcattatgaagaattgaatgagcttttaagaaaagcgcaggactatattaaaaatgaaatatccagataagttattagctgaagtcaaggaaagatcaaaagggatgagattagaaggaatcaattttggagctggtccagctcatcctaaattaatgattattggtgaagcgccaggaagagaagaaatagagtcactgattccttttcatggtgcttccggaaaagaattaatgaagtcgttagcttcaattggcttaaaacgagaagatgtctatattactagcgcagtaagaagtcgaccttatagcgtgaagaaggtatttagtaagaaagaaaataaagaagtcacaaaataccctaatcgaaaaccaactaaaaaagaaattttagcgcatgctcctttattagatttcgagttgcgatatgctcaacctaaagttattgtaaccgtgggtacgactgctttgagccgattacttgaccataaatatgaaattagtaaagtacatggtaaaattattaaaaatacctcgattttagaattaaacgataaaaaggatggctatgtttggtctaaagaaaagtatacggtagtaccgcagtatcacccggcagcagttttttataatcgaaaacttaccgatataattgctcaagattggttaaatgtaaaacctttaatttaagttagaaaaaataaaaactggtaggaattaatttcctgaccagtttttttaatcaatattgttacgatatagaccgacaactttacctaaaatttgaaccacaggtaaaataattggatccatagtgtcattctcaggttgtaaacggtaatatccatcctctttaaagaacctcttaactgttgcttcgttatcttcagtcatagcaaccactatttcgccattatttgcactagattgcttgcgcacaattacatgatcaccgtttaggatcccagcattaatcattgattcaccatgaacgcgtaacatgaaaagttcgccagcatcattttcaagatcgggtggaagaggaaaatattcatcgatatcctgaaccgctaaaattggctgaccagcagtcactacgccaacaattggaatatctttaggtttaattcctaaagcttctcgtcctttttcagttacttcaattgctcttggtttagtggcgtcttttaaaatatatcctttcttttcaaggcgagctaaatgaccatgaacagttgaagttgatgaaagatcaactgcactacagatttctctaactgtaggtggaaaagctcgttcttcaacagtatcgtaaataaaacgtaaaatttctaattgtttatttgcatgtggttcagtcataattttttctccatatagttacttactagtattctaacaaaaaaactttatctcagcaaacaggcgttcttggtagttgagtctttttttattgctataattaaggtaaactaacattgtttagtgaggtgtttatttatggataaaaaagaagaggaaaagctgattaaaagaattaatgagctaactaaaattagtagagaacgtgaattaactcctggtgaagtggaagaacgaaagaaattaagatccgcttttctagaaaacttccgtgcaggctttagacagcaattagaagacacggtagttattgatgaaaatggtaaagaagtaacctcagaaaaagcaaaagaggcacaacgtcgtaaaggattaagaaaagattaatcttctactttaaaaatagctgtttttttggtatgctgaaaaagtacattaattttcggaggtttttgggaaatgaatttaggtttagcaatttttcttattattatcgcattattaatcggtcttgtcggcggattttacggtgctcgtgcatacatgaagaagtatttccaagacaatcctcctattagtgaagatatgattgcagctatgatggcgcaaatgggacaaaaaccatccactaagaagcttaatcaagttatgaatatgatgaagcatcaacaacaaaagtagtagcttactttactaatatttggtaatagacagaggaccggtttcctctgtttttttgtatattgtgaggtgaaaagatgaatattttcagcaaattgggctggttttttaagcaagaaaaaaagagatatattattggaattagttttttggctttaacttcgatcgcaaatttagtacctccgagaattttaggattgatggcggatcaactagataagggatcaattagttggggcgaatacggcgctctaattttagcggttgttgcagctgcaattgttttgtatttattacgttacttttggcgtaagcagatttggggtggtgctgctgaattagaaaggcaaatgcggtcacgtttatttaaacattttatggtaatggatcgaactttttatcaaagacaccggactggtgacttgatggcgcatgcaacaaatgatattaattctattcaaaatgttgcgggagacggtattttaactttagtcgactcattagtcactggtggaacaacgatgattgcaatgattatctttacagactttcgcttaacaattattgcacttttgccgcttccttttcttgctttaggtgcttggaaattaggagataaacttcattatagttttgataagtcacaggcggcattttctcgtttaaataataaaactcaagaatctgtttctggaattaaagtattgaaagcatttggcgaaagtaagcaggattctgccgcctttaacaaaatggtagatgaaactattcagatcaataagaaagtttttaaatgggattcaatgtttgatccactaggaaccttaattattggggccacttatgtaattacaattatttatggtggtttattagtaacaaatcatactttatcggtcggacagttagtctcatttattgcttatatttccaatatggtttggccaatgtttgcgattggttatttatttaatattttagaaagaggatcagcttcttatgatcgtgttgaacgtctcttatatgaaagaccgcaaattacagatgaaaacgctgatcaaagtttaacggctaaagatattcaaggtgatctgaaatatgatattcaatctttttcttatcctgatgaaaaggaaatacccgtcttacaaaatattgatttcaccttaaaaccaggacaaacattaggattagttggtaaggttggagctggtaaaactacaattattgagcttttacttagagaattcgatcgctatcagggcaaaataactttaggcggacatgacattcgaaatattccgctaaaattattgttaaatgaaatttcttatgtaccgcagaataactttttattttctacttcaattgaaaagaatattgcattttcagatcaagacgcagctaaaagtaaaatagaatctgcagctcaaaagagtgatttacatgatgatattatgcagatgccagcgggttatcaaactttagttggagaaaacggtgtttccttgtctggtggacaaaagcaacggttatcaattgctagagcattattaaaagaaagtccgattttgattttggacgatgctctttcagcagttgatgcgaaaacagaaactgctattttggattcacttagatctgagagaaaaggaaaaaagacattgattgcggcacaccgtttaacttcagtaatggatgctgatttaattctagttctaaagaatggaaaaattgttgaaagaggaaagcatgatgagctactggcccaagatggttggtatgctgaaatgtggcgtaaacaagaattacaagcaaaggtgggtgaagtagatgggcaataatgaagaaactaaatcagtttggtcaaaggcaataccgtttaaagaacaagttcagatttttaaacgtgttttaaaatatgttaaaccttttaaagttgagatggggatcgccgtttttggggctttcttagtaagtgtaattaatatgcttttgccgagagggctgcaatttttcttagataattatttgattaaacaaaaagcaacagttcaaattattatttgggctggcttgttgtatgggctaggaacaattattaaggcgcttcttcaattcgtgtaccagtatttgtatgcccttggtgctgaaaagacgcttgagagtgtcagaaaagatttgtatcataagcttcacagcctagggatgcgatattttgatcagactccagctggttcaattgtttcaagagttactaatgatacgatgactttgagcgatttcttgggagtactttgtcaggtagttattggggtcttctcattagtaactgcttttgtagcaatgtatgtgaccaataaagttgccgctttgatcgtgctattatttttgccaattttaggttttgttttttggatttatacgcagaaaagctcaaaattatatcgtggttttcgtgaacgcttaagccggattaatacgaatttaaatgagtcgatagaaggtgtatccttaattcagcaatttaagcaagaaaaaagaatgactaatcattttgaaaatgaaaatggcacattgatgaaaactcgctttaacatgattagggtcaactcactattgttgtctccaatgactagtttgctttattctttagcattagcactagtcttaatgtactttggctttccacttcaaaagacctttgttccagctggaattgtttatgcattttctcaatatgtacagcagttctttaatccaatttctactatgatggatcgaatgactttctttcaagatggaattgtggccggaaaacgtatttttcgaattatggatgaaacagaatatgagcctaagcaagaagatgataaaaatgcagtaatctctaaaggcaagattgaatttaaaaatgttagtttttcttatgatggcaagcatgagattttgcataatgtatcttttgtagttaatcctggtgagactctaggaattgttggtcatactggatcaggaaaaagttcgatcatcaacgtgatgatgagattttatgaatttggtagtggacaagtcttaattgatgatattgatattagaaagttttcgaaaaaagaattacgcaaaaaattagggttggttttacaggaaccgttcatgttttatggcgatatttcttcaaatattcgtttatataatgatcaaattacagatcaacaaattaaaaaagcagctaaagcagttcaagctgattcttttatcgaaaagatgcctggtaggtatcatgctaaagtgattgaaggcggatcagagcttagccaaggccaaaggcagttaatttcttttgctagaactttagtaacggatcctaaaattttggttttagatgaggcaacagcgaatgttgatactgaaacagaaaatttgattcaagaagggttgaagaaacttcgtcaaggaaggacaacattagcaattgctcaccgactctctacaattgcagatgctgatcaaattattgttttagataaaggaagaattgtagaacgaggaacacatacagagttactagaaaagaaaggttactactacaatctttataagctacaacaaaatagtaataaataaaatgctcggtcaactgaccgagcatttttactgtatattttttaagttattatttatcgtttaacatgtattgacgagtcattggtaagcttttacctgatgggcctttagttaatagatattgaataacatcaatgtttcctgattcaaaagatgctgcacaagcttgaaggtacatgtcccacattcttgcaaaacgttcacccatcattccttcaacttcagaacggtggtcattaaagttcttatcccagatttcaagagttctttgatagtgacgacgaggcatttccatatcagcaatttgcaagttagcttcttcaattcttgaaacaatttctactaaaccaggaatgtagccacctgggaagatatatttattaatccaagcattagtagcaccgccttgttgacgagtaataccgtggatcaaagcaacaccatgtggttttaaatacttagcaacatctttgaaatattcgcctaaattttctgagccaacgtgttcaaacattcctacagaagttacatagtcaaagttacgattacctaattcgcgataatcttcaagtaaaacttctgcttggtcttcgagccccatatctttgatttttttgttaactagatcaaattgttcttgactcaaggtaacaccagtaacttttaatccgtattctttagctgcagttaacattagagtgccccaaccacagccgatatctaacaaggtcttacctggcttgggatctagcttttgaagaatatgatgaacttttgcaatttgagcagcttcaaggtcatctgtatttccgttagtgaagtaagcgcatgagtaggtcatagttgggtcaagccataatttgtagaagttatttccaatatcgtagtggctttgaatatcttcttgactttgtttttcagtatgcttttgcttaggtaaaaattttctgaactttgaagcacgcatgaaggattcgctactttcataagcagcttcaattaactgttgaatacttcccttgatttcaaggtccttattcatataagcttcacctaaagctaaagatgcattacttgtaatatctttaaaaggaatctttttgttaaaaataacctccacttccggtgtgccatttccataaacttctgattttccatcccagtaagtaacttttactggaatatgtgaatgactaagcatcattttatataaaggtttttctaacattactgattctccttttctacattagactatgttattctaacactaaaaatcttaaataataaaaaattattttgcaatataatgaaaactagggttttgttccttatctagtttatcccatgcatcttctaattgctgatacaaggctggcgtagtttctttgttgactttctctttacgcggaatataaatgggatcgccaaaacaaacctctaatggttgtcttttaagtaatcctttaaaagtgagaggcccttgatagacaacaggaactaagggcttattggccattttagcaatcacaaaggcgccacttttaagttcctcagaatgacgagttccagacggaaagataattaaagagaggtcactttttcgtagtcctttaactggaattttaattgcagaaggtccgggattatctctatctactgaaaaagcatgtgcatgaactaaaataaagcgcaatacagggtttttaaaaagttctttttttgccataaacataaattccattgggctagcagctagagcaaaaagaattggctcccaccaagttctatgcggtgcaactaaaatataatttccttttggaatccgatctttgtgatggacatgcagatgtccattaagtacccatacaataaaacgtgcaattgggcgaataattttataaaacatattgtttcctccaattttatgtatagtattatacaatacagcaaagaatttttagaagggtatagaaaatggatctattaaaacctaatgaacgaattgactatatgtataatgatgatttacgcattattcaagaaaaagatgctttttctttttctttagatacacttcttcttggctactttgcacagataaaaatacatgataactataaagttgttgatttatgtagtggaaacgccgcagccagtatttatatgtcttattttaatcgagctcattatgatgctgtagaaatacaagcagatatggctgatcaagcaagccgtagtattaagttgaataagttggaaaatcggatcgaagtgcactgcttaaatgctttagaggcgcctaagaagttaggcaaagacaaatatgatatggtggttgttaatccaccttattttaaagttcctaagggacatgttattaatccagatgaaaagaaggctttagcaagacatgaactagcaattaatcttgaacaaataataaaagtttcaagcgatatgttaaagatgaaaggaaaaatgtttatggttcatcgcccagaacgtttgggtgaaatcatgcattattgcttagaaaaccatttaagtgtgaaatgggtacagccatttgtttcaaagagaaatgcagatgcaaatttagtggtagttgaggcaattagaaatacagctagcgatggtttaactttaagggatgcaattgttgttcacaatccggatggatcatttacacctgagatagagcaaattatttctgaaaataaaaaacaaaagaaagaaagatactatttttattgcttattatgtaatgatggcagtttctacggcggttttacaaacgatttaaagcaccgattaaagatgcacaatgagggaaggggtgctaagtatacaaaagcacgccgaccggtaaagatgatttaccatgaagagtttgctgataaaaggctggctttaaaaagagaatattggtttaagcatcattcaagaaagtggaaagaagaatttttaaaagaacataatgtaaaattttaattgcatttaagaactttattcgttacaatattcgagtatgcattttgcatatttaaatttatatcacatcaagagcgattaaattcctaggtgccaatttttggtcagaatttaatacgacctcttgagaggaattaaccaggaggaattttttatgacagttgttactatgaagcaattgcttgaagcaggtgtccactttggtcaccaaactagaagatgggatccaaagatggctccttacattttcactcaaagaaacggaatctacatcattgacttgcaaaagactatcaagatgttagatgacgcttacaactacgttaaggcagttgctcaagacggcggtgtattcttattcgttggtactaagaagcaagcacaggacgctgttaaagaagaagctacacgtgcaggtcaatactatgttaaccaacgttggttaggtggtactttgactaactggactactatccaaagccgtgttaagagattaaagcaattaaaagaaatgtcagaagacggcactttcgatgtattaccaaagaaggaagttgctcttttgactaaggaaatggaaaaacttgaaagattcttaggtggtatcgaagatatgcctagaattccagatgttatgtttgttgttgatcctaagaaagaaaagatcgctgttcacgaagcaaacattttaggtatccctgtagtagctatggttgatactaacactgatccagatccaatcgacgttgttattcctgcaaacgacgatgcaattcgtgcaattcgtttaatttcaggtgctatggctgacgcaattatcgaaggtaagcaaggtcaagatgacagcgaagacgttgaaaaagaaatggctgacaaagctgcagctgaaaacgatgacgaagaatctatcgaagaagttgtagaaaaatcagaagactaatttgtttttactgttagttctgtaggaggacatattaatggcaaaaattactgctcaattagttaaggaattacgtgaacgtactggtgctggtgttatggacgctaagaaagcattagtagaagttgacggtgacatggataaagcagttcaatatcttcgtgataaaggcatggctaaagctgctaagaaggctgaccgtgttgcagctgaaggtttaactggtgtttacgttgatggtaatgttgcagctatcactgaggttaactcagaaactgactttgtttcttcaaacgataagttcgttaacttggtaaatgcagctactaagactattgctgaaggtaaacctgccaacatggaagcagctgaagaattaaagatggctgatggtactactttagctcaatcttttgtagatgcaactgctacaattggtgaaaagattgttttgcgtcgtttcgctttagaagaaaagactgatgatcaagaatttggtgcttaccaacataatggtggccaaattggtgttatcactgttttagaaggtgctgatgctgctactgctaaacacttagcaatgcacattgctgctatgagtcctaaggttatttcacctgaagaattagatgatgatttcattactgatcaattggctgtgatgaaccacaagattgatcaagataatgaaagtcgtgctttggtaaacaagaaaccattgccacaccttgtttatggttcagaaaagcaattaagtgatgagattttagctaaggctaaggaagacatcaaggctgaacttaaagaagaaggtaagcctgaaaagatttgggataagattattcctggtaagatgcaacgctttattgacgataatactcaagttgataagcaattcgcagttttatcacaaaactacattatggacgacagcaagactgttggtgaattcttgaaggaaaagggagctaagttagttgctttccaacgttatgaagttggcgaaggtattgaaaagaagcaagaagactttgctgctgaagtacgtgaacaaatgaagtaattatttacttaaaagggagtaacgctaaagcgctgctccctttttttctgtataatatattacagtgattttatggtaaaatgataaaagcatatgaggaggtaaatttatgagtcaaattaagtacaagcgtatcattttaaaagtttcaggtgaagctcttgctggcgaaaaaggtactggcattaatccagaagttattaagcacttagctgaggaaataaagtctgtacatgatatgggcgttgaaatcggtattgtttgtggcggtggaaacatgtggcgtggtgaaactggtgcaaacttaggtatggaaagagctcaagctgactacatgggtatgttggctacaattatgaacggcttagctttgcaagatggcttagaaaatttaggtgttccaactcgtgttcaaacatcaattgaaatgcgtcaaattgcggagccttatattcgtcgtaaagctatgcgtcacttagaaaaaggtcgtgtagttattttcggtggtggtactggtaatccttacttctcaactgatactactgctgccttgagagcagctgaaattgatgctgatgtcattttaatggctaaaaatggggttgacggagtttactcagctgatccaaaggttgatccaaatgccaagaagtattctgaattaacccaacttgatttgatttcaaagaacttaaaggtaatggatagtacagctagttcactatctatggataataatattcctttagttgtctttaatgttaataagcctggtaacattaagaaagttgttatgggcgaaaatattggtactgtaattaagggtgataaataatggctaatgaagtaattgaaaaagcaaaagataatatgaaaaagtctatcgctgtctttcaaaaagaattaggcggtattcgtgctggtgttgcaaacgcaagcttactagaaggaattaaggttgattattatggtgttccaacccctcttacacaaatgtctagtgtaagtattccggaagcacgtgtattaatggtgactccttatgacaagtcaagtttagatgatattgaacatgctattttagcttctgatcttggtattacaccagccaacgatggaactgtaattagaattgttattccacaattgactggtgaacgtcgtcaagaaattgctaagcaagtaggtaagcttgctgaaaaaggaaagattgcagttcgtaatgttcgtcgtgacgcaatggatactttaaagcgtcaagaaaaaaatggcgatattactgaagatgaacaacgtagtttagaaaaacaagttcaaaaggtaactgatgatgctactaaagaaattgataaattagcagatcaaaagagtcaagaaattactcaaggttaatctagggcttgataaactatgtcagaatcaaaaaaatcacttaatcatttagccataattatggacggtaatggcagatgggcaaaaaaaagacatttacttcggtttgttggtcatcgtcatggaatggataatattcgaaatattgctctagcagcaaatgagatgggaatcaaagtcttaactctctatgccttttcaactgagaattgggcaagacccacggatgaagtaaattatttgatgcgtttgccaattgacttttttgataagtttatgcctgaattaatggaaaataatgttcgggtaaatatcatgggctttttagatgaattacctgagaagacttatctagtaacacaaaaggcaatggcagaaacggctaataataccggtatggtcttaaattttgcctttaattatggatctcgacgtgagataactgctggtgtccaagaaattgctcgtcaagtaaaagcaggaaaaataaatcctagtgatattgatgaaaagatggtttctgatcatttattaactcattccttaactccatatgacgatcctgatttattgattagaacctcaggagaggaacgtttatcaaatttcttgttatggcagatggcctatactgaatttagtttttcaaataaattatggccagattttgataaaaatgatttggaaaacttagttaaagattactacggacgtaatcgtcgatttggaaaattgtaaaattattagaactgtagatttttaaatgaaacaacgtgtaataacagctattgtagctttaattttatttattccgattgttttaatgggaggcatctggattgatgtccttgcctgtgcctttgcagcagttggaattagcgaaatttttatcatgaagaaacagattattgtttcttgggattttatcttggcattattggccactttgactatggcagtgcctgactcattctttaagtttttaccagcttttttgaataagtataatgttttttatatttttgtaatgctaatgctggtaagaacagttttatctaagaatagagtaacttttgatgacgctggtgtttatactattgcagcgttatatattggtactggtttccactttatggcagctattagaaatgctcatcttggattagcaatcttaggttatgtatttgctgtagtttggtcaacagatattgcggcttatatggtcggtcgtaagattggaaagcataagttatggccagtaattagcccaaataaaacttgggaaggttccattggcgcagttatctgtgcagtaattgttgcagcagtttatgtcgctttagttcctaccggtagaaataatgttttaatgattatcttggcctttttcttgtcaattattggacaaatgggagatttagttgagtctgcctacaagcgcttttatggtgtaaaagattcaggaaaaatcttgcccggtcatggcggaatcttagatcgttttgatagcatgcttttcgttttacctgttgttgcatttatgggtattttataggagaactgctaaatgaaaggtattttaatctttctagttgtttttgggatacttgtttttgttcatgaatttggacattttattgttgcaaagaaatgcggtattctagttcgtgaattttcaattggtatggggccaaaactattccaaaaaatgcgtgctaagaccacttatacgataagatggcttccattagggggatatgttcgcttagctggccctgatgatgctgctaagattgatcccggtactaccgtagttttgcagttagataagcaaaataaggtaaagcgaatcgatgcttccggatctcaaatgcctattgaaggtattcctgtgcaggttaattcagcggatttggtagatgatctaactattcaaggttatgaaaatggaaatgaagatcaacttaaaacatatgctgttgatcatgatgcaacgattatcgaacaaaatggtactgaattattaattgcgccacgtgatacgcaatttcaagaagcaagtgttggaaaaaaactagctactaatttcgctggtccctttatgaatattattttgggctttattgtatttattatttggtctttagcagctcctggtgctccgactacaacagtaggaaacacaattgctaatcaaccagctcagattgctggtattaaagctaatgatcaaattattgcaattaatgacaagaaaattagtaatttcaatcaaattgcttctgaacttgcaaaaagcaagggaaagactgttgaagtgacggtaaagagagaaaacaaagttaaagatttctcagtaaaacccaaagctagaaaaataaatggtcaaagaatttatcaattaggattttatggcaaacccgataatagtcttggagctaagctaaagcggggctgggatacaagtattagtactactggtttaatatttaatgcagttggaaatttgtttagacattttagtttaaataagctttctggtccagttggaatttactcacaaacagttcaagtttcaaatatgggttttacttatttgctagcatttttagcaatgatttctatcaacttaggaattgtaaacttaattccaattccaggactagatggtggtaagttgttacttaacctaattcagctaattattggaaaaccaattcctgaagataaagaagctattgtagatgtaattggttttgtcattctattactattaatcgttgctgtaactggaaacgatatttatcgatattttattaagtaaatttttggaggaataaatgcgtcaatcaaaattttttatgccaacattaaaagaggcaccttctgatgctgtagcaaaaagtcaccaattaatgcttagaggtggttatattcgtcaggtaactgctggagtatatgcatacttaccattaggttatcgtgtattacgtaaggcagaaaatattattgaagaggaaatgaacaatattaatgtgcctgaaatgattatgcctcatttattgcctgctactctatggcaagaatctggtcgttataaaaaatatggcgcagaaatgtttaaacttcaagatcgtcatggtcgtgaaagtttgcttggaccgacacatgaagaaacttttactgaaattgttgccaagaatttgaagagttacaagcaaatgccacttgctttgtatcaaattcaaacaaaattccgtgatgaaaatcgtcctcgtttcggccttcttcgtggtagagaatttgtgatgcttgacggatacagctttgctgcaactcgtgaacaattagatgaacaatttgatgatcaaaagagtgcatatttaaagatctttaatcgtgctggtgtgactgttcacccagttattgctgactccggtacaatgggtggaaagaattcaactgaatttcaagctcctgctgcaattggtgaagatacaattgctacaaatgaaaaaggaacatatgccgcaaaccttgaaatggctaaaagtattgatacctttaagcaagatccagaagacgcaaaggaattaactaaagtcgctactccgggtatggatacaattgataaattggctgaatttcttaaagtacctgctaccagaattgttaagagtattttatatattgccgatgatcaaaaagtcttagttttgattcgtggtgataaagaaattaatgaagttaaattgggacacgttttagatgctgatgaagtgagaactgcaaatgcagatgaactagtagaaattactggttctgaaaaaggtggtgtaggaccaattggtgctgactgggccgataagattgttgcagacgaaacagttaagggcttatacaatgtagttgttggtgccaatgaaactgattatcaatatcaaaacgctaatttagatcgtgacttcaaggttgatgaatttgctgatattcgtacagcaaatgaaggtgaactagatccagttgatcatttaccattgaaatttactacaagtatcgaagttggtcacattttcaagttaggtacttactacacgaagactatgggcgctgatttcttagacaacaatggtaaggcaaaacccgtaattatgggttcttacggaattggtgttacaagaatgctttccgcagcggttgaacaacatttaactgaaaacggaattgcttggccaaaagaaattgctccgtttgatgttcatttaattcaaatgaagatgaaagatgaagctcaaacagaattggctgaaaaacttgaaaaagaactttcaactaagtatgatgttttatacgatgatagaaatgaacgtccaggtgttaagtttaatgatgcagatttagtcggtgcgccattaagaattacaattgggcgtaaggcaaaagatggaatcgtagaagttaagcgtccaactgatgaaaaggctatggaagttaatatttctgatttggatgcgatgattacaaaagagttaggataatttttgtggcaaataaaaacgaacttttcaaaaaactattagatcaaatcaagtttcctgataagtttgaagataacgatattgtccaaaatggtgaaattgaaaacgtggatgtatacgctaatgaaagaaagtggaaaatccacgttttttttgatacaccactagattttgaaacttatcgttctcttaatgaacttattcatcagacatttgaaccttttgtgaatgttgaattaatagtccggaccaaggatggaagtagtaagaatttaccagaatattggacatatgcaattcaaaattcgactaatttgaaacctgcagttcgggaatttttacaaggacaagccccatatttagaaaaagaaaaatggttgattccaactcaaaacaatgttgtgaatgggcttctttccgagcaagttttagcagaacttaatagtgaatttagaagatatggcttttttaatatcaagtttactaccaaggtcgatgaaacaaatattgatgaaaatctaaaaagcttagaacaagtgcaggctcaacatgaatcagcaatgcaagaattctatgaaaaacaacctgctgaacctaagaaaaagatgcctgttaaaagtacaagaatgggtagtaataaagttgataaaaaggctaagtttattcagattaaagatttggaagatggaagcggcaatgtagctatcgaaggtcacatctttaataccgatattcatgaattaaaatccggaagcgtaatttttacaggtgaaataactgactatactgattcaatcagctttaaaaaatttgtttctgataaggagcagattgattatctaaaaggaatcaagcctggcgtttgggctcgtatgcaaggttatgcagctgacgaccaatatcagcacgatgttgtttttaatattcgtaacctagaattaattgaacataagggtcgagaagaaaagtatgagggagaagaaaaacgagttgaactgcaccttcatacaaatatgagtcaattagacgcaactagtactgctagtgattttattaaaaccgctaaaaaatttggtcaaaaagcaattgcaataactgatcatgctgatgttcaagcattcccagaagcatatcataccggtgcaagtgagaagatgaagattctgtatggatatgaagctaatatgattgatgatcatgctttgctcgtgcttaatcctactgaaatggattatcgtgatcgtgaatatgtgatttttgatgttgaaacgacaggtctttcatctgtctatgacactattatcgaaattggtgctgttaagatgaaaaatggtgaggtgcttgaaagatttgatgagtttattaatcctcatcatcctttaagtgatactactattaatttgacatcaattaccgatgaaatggttggagcagctgacgatgaaaaggatgtaatcaagaaattcaaagatttctatggagaccgtcctttatgtggtcacaatgttcagtttgacgtaggttttgtaaacgctgctttacgtcgtgcaggcttagatgaaatttctcaacctgttgttgatacccttgaagtttcaagactgttgcatcctgagcagactcgacatactcttgattcgctagccaaaaagtataatgttgttttggaacatcaccaccgagctaatcaagatgccgaagctacaggatatttgatgtttaagttacttgatgcttttaatgctcgcttccatgaagcagatttaggtaaaatgaatgactatgcgaagtatggtcaagtatacaagagagctaagcctagccatatgagtgttcttgctttgaatcaagaaggcttaaagaatatgtataagcttgtttcactagcaagtacgaaatacttttatcgtatacctagaacgcctaaatccgaattaagaaaatatcataaaggactattgtttggcagtggctgctggcagggcgatgtgttcatctcaatgatgcaaaaaggatatgatgaggcgcgtgagaaagcccgcttttatgattatcttgaagtgcagccacctgcagcttatcaaacgctaatcgacgatgatttgattaaagatgaagatgaattgcatgagattattcaaaatatttataaattaggtaaagaattgaataagccagttgttgcaactggtgactcgcattatgttgaaccccatgaggccatctatcgtaaaattttattagctgcgcaaaagtcaaatcctaatcgtaataagaaattacctgatttgcatttttattctacgcaggaaatgttggatgctttcagctttttaggagaagatgttgctaaagagattgtaattgagaatacaaataaattagcagatcaaattgaagaaattgctcctattaagagtggtttatatccgccacatattgagaatgcagatcaagaaatgaaagacctgacttacaacaaggcttatgaattatatggaaaaccactacctaagattgtagaagatagaattgaactcgaattaaattcgattatttctaatggatatgctgttatttatcttatttctcagcgtcttgttgccaaatcaaataaagatggttatttggtaggttctcgtggatcagttggttctagtttggtagcaacaatgtctggaattaccgaagtaaatcctttggctccacactatcgttgtcctaaatgtaaatattctaaattttttgaaaatggggaatatggttctggctacgacttacctgataaaaattgtccgaagtgtggaactcctttagtaaaagatgggcaggacatcccctttgccactttcttaggcttccacggagataaggttccggatatcgatttgaacttctctggagactatcagccagtagctcataactatattcgtgtgatgtttggtccagataattcatttagggctggtacaattgcgactgttgctgataagacagcttatggatatgtaaagcattatgaagatgaaaatgaattgcatttaagaaatgctgagcttgatcgtttagctgccggtgcttccggggtgaagagaacaactggtcagcacccagctggaattgttgttgttcccgatgatatggatatttatgactttactcctgtgcagtatcctgctgatgatttaagtgcagcttggcttacaacgcactttgatttccactctattcacgataatattttgaaatttgatattctagggcatgatgacccaactatgatcagaatgctgcaagatttatcaggaattgacccattaactattccgcctgatgatccaggagtaatgtccttattttcaagtcccaaaattttaggtgttactcctgagcaaattcagtcaaagactggtactttgggtgttccagaatttggtacaaaatttgttcgaggaatgcttgaagaaacaaagccaaccactttttcagaattgttgcagatttcaggtttgtctcacgggactgatgtatggttaggaaatgcagaagatttaattaataacggaacttgcaagttaaagaacgtaattggttgtcgtgataacatcatgatggacttaattcactggggagtaaaaccagaagttgctttctttacaatggaatctgtacgtcatggtaagggaattagtgatgaaaacatggaaattctgaagaaaaatgataagattcctgactggtacattccttcttgtttgaagattaagtatatgttccctaaggcccatgctacagcctatatcttaatggcacttagaattgcttggtttaaggtatattatccagtaatttattatgcttcttatttctcagttcgggctgatttgtttgatttagttgcaatgagtcatggaaagaacacagtaaaggctgcaatgaaggaaatccaagataaaggaatggacgtttctgctaaggataagtcgttacttactgttcttgaaattgcaaatgaatgtttagaacgtggtataaagattaagatggtcgatgtgaatgaatctgaagcaatggactttaagattattgatgatcatactattctagctccatttaatgcagttccaggtttaggtgataatgctgctaagcaaattgttgctacgcgcgcagagcagaagtttctttcaaaggaagatcttgcaacacgagggaaagtatcacaaacaataatggaatactttgagaacaatggagttcttgaagggatgccagatcaaaatcaattatcactattttagtgtgttaatttacaaatattagtaaatatgctattctaagaacgaagttcgaatagcaaattcgagtgagcagtaatgctcactctttttattacggaggaagagatttgacaaaggttaccgaattggtggcagacgtagttacgcctttagctgaagcaagaggtgatgaactggtcgatgttgaatatgtaaaggaaaagaagcaatattatcttcgcatttatgttgatcgtcgcccaggcggaatcgatattgaagagatcgcaaatttgagtgaattggtatcagaaaagctagatgaattagatcctgatccttttcctgagccgtatattttagagctttcatctcctggtttagagcgtccaattaaaaatgaaaaagattgggagcgcgccaaaggatcatacattcatgttagtctttatcaaaaaattgatggagaaaagacttatgaaggtactttaaaagatctcaatcaaaatcagatcgtcttagaagtaaagatcaaaacacgacgcaaagaaataacaattcctcgaaaggtaattgcttctagtcgctttgcagttgaattttagaaaggatgatcaaaaacttatgtctaaagaaatggtggaagcttttgcaaccttagaaaaagaaaaaggcatcaagcaagaaattattgttgatgcaattaaggctgccttagtagctgcatataagaaaaattataatcaagctcaaaatgttgaagttgtttttgatgaaaagaagggtaacttcaaggttaatgcaattaagacagttgttgatgaagttcaagatagtcgtcttgaagtaagtcttaaagatgcacttgaaattaatcgtgcgtatgaagttggcgatgaaattcgctttgaagtaactcctaaagatttcggtcgtttagctgcacaaactgctaagcaagttattatgcaacgtttgcgtgaagctgaaagagaacatattattagtgaatattctcaatataaggatgaaatcgttactggtacggttgaaagacgtgacaatcgctttgtttacgtaaagatcggtaatgttgaagccgtaatgccacataatgatcaattaccaggtgaaaattacaaccctcaagataaagttcgtgttttagtaactagagtagggtcagattcaaaaggagctcaaattacagtttctagaactgcacctgatttagtaaaacgtctctttgaacaagaagttccagaagtttatgatggaaccgttgagattgtatcaattgctcgtgaagctggagacagaactaagattgcagttaagagtaatgatcctgatattgatccagttgggaccttagtaggaccaaagggtactcgtgttcaaaatattgttaatgaattaggcggagaaaatatcgacgttgtaaaatacgaagagaatccatctgattttattgccaacgctttgaatcctgcagaagtaattgcagttcaatttagtggtgatgatgatgacaagaatgccctagtaattgttcctgattaccaattgtctttagctatcggaaaacgtggacagaatgttcgccttgctgctcgtttgacaggttataagattgacattaagccagaatctcaagttgagtttgtcgattctgaaggcgatgacgttgaaacagatcaagatatcgatgatagtaatgtatcaaatgaagaagcaacagaatctactgctgaacaactagaagaagattcaagcgaagattttccaaatggggaagatgttgattcagcattagatgatgatgcagataaagatgaggaataggtgactttctttgaaaaaaagaaaaattccaatgcgtaaggatctattgactaatactatgcaacctaaaaaagaattagtccgcgtagttgttgacaaggataaaaatatttcagtggatccaactggaaagaagtcaggtcgaggagcctatgtatctttagagcccgataagatcgcagaagcgaaaaaaaatcaggttttagaaaagagcctaggtgttaaagtttcagctgacttttatgatgatctttatgcatatgttgatcatcaaaaagcaagaaaagaattgtttggtgataaataattttgcaaaacaaacaaaaaactttgaatttacttggattagcgcaaaaagctggaaagctagcaacaggatttgatgcagtaaaaatatctttaagcaaaaatcaagcaaagttaatttttgttggtagtgatgtgagtcagaatactaaagataagcttgcttttttgatgcgtaaaaaagatgttaaattagttgatgtattttctagcgctgaaataacacaggcacttggaaaagaaagaaaattagtttctgttacagatgcaggcttcagcaaagcaatgataaagaatttaaacgaaggagtgtgatttgatggctaaaaagcgtatttatgaagtagcgaaagaattaggcattgaaaacaaaattgttgtaaaaaaggcacaagatttgggttttgatgtaaagagccacatgtcctccctagatgataagcaagtctctaagttagtagatagttttaagtctgctaatactactaagccatctactgaaaaggattcgaaaaattcaagtcgtaaagaaaaaacaaaaataaaggtttctgtaggtgcaattcgtcgtcgtgataataaaaatgatcacgataatcgccatggtaataataaacgcagaaacaataaatttaaaaaacaacaaaatgatcgtcgtgctgaacgaaataaaccgcaaacagaagctaaatctgcagcacgtgatttattgaataaatttaagaaaaagcaacgagctgaagctagtgaattaaacgctcagactgaagcttcccgccgtaaatggcatcaagaacaaaatcctcaaagatcaaaggttaaaaaagtggaaaatactcgtaagccaaaagaagaaaaacttgaaggagctgcagctgttaaagctcgtgtacaagcttcacaaaaaccagttggtccaaagattattaaaccatcgccggcaagaaataaggcaaagagacctactgtgaagaaggtagaaccaattgctccagttgtacctgctcctcaaaaagaagaaacaaaaccaactcgcaaaaaagactttactcgtaagaaacgtgaagtgccagattatgaacgcgaaagaagcgaacattctgataaggcacgtcgccgtagaaataagaaaaataagcgtattaatcaaagtaaagaagttaaaaagcaaccaacgcaaagaaaggaacgtccattgccagaaacattggtttatgaagaaggcatgaatgctcaagatttaggaaaacttcttcatagggagcctgctgaaattgttaagaagctctttatgcttggtgtcatgactaaccaaaatcagtctttggacaaagatactattgaactcctagcaactgaatatggtattgaagcacaagaaaaagtgcatgaagatatttcagatattgatactttgtacactaaagaaatggaagaatcaaaagcttctaagcatcaagaaaagcgtcctccagttgttacaatcatgggtcacgttgaccatgggaagaccactttacttgatagattacgtcatactaatgtttctgaacatgaagcaggtggtattactcaaaagattggtgcttaccaagtacgaatcgatgatcgtttgattactttcttagatactccaggacacgcagccttttctaacatgcgtgctcgcggtgctgaaattactgacattgttgttttagtagttgcagcagatgatggtgtaatgccacaaacaattgaagctattgaccatgctaagagtgctggtgtgccaattatcgttgctgttaacaagattgataagccaggtgcaaatccagatcatgtaatggaacaacttatgaaatatggcttagttcctgaagactggggcggcgatacaatctttgttaagatttctgctaagacaggtaaaaatgttgaagaactcttgcaaatgatcttgcttcaagccgatgttatggaacttaaagctgatcctgatcaaaaggcgattggtactgtaattgaagctcgtcttgataaaggacgcggttcagttgccgatgttttggttcaacaaggtactttgaaggttggagatccaattgttgttggcgatacgtttggtcgtgttcgtgttatgactaacgataagggacgtagagtcaaaaaggcaactccatctgctcctgttgaaattactggattgaatgatgttccagaagcagctgataagttagtagtctttgaagatgaaaagacagctagaagtgttggtgagcaacgcgctaagaatgctttagagaaacaacgtgagaatgtccaacatgttactttggataatttgtttgacacaatgaagaaagaaaacatgaaggaagttgacatcgttcttaaggccgatgttcaaggttcagctgaagcattgcaacaatctcttgaaaagattgaagttgaaggcgtaagagttaacattattcactctggtgttggtgcaatcaatgaatctgatgttaccttagctggtgcttcaaatgcatttattgttggatttaatgttagaccaactaatactgctaagagtcaagcagatgctgaaggtgtagatattcgtctttataacattatttacaaggttatggacgatgttgaagctgctatgaagggtatgcttgaacctacatacgaagaaaaggttactggaaacttaactgtacgtgaaacttggaaggtatctaagatcggaacaattgctggtgcttttgttgataatggatatgttactagagattccggtatccgtgtaattcgtgacggtattgttaaatatgatggaaaagttgcatctcttaagcgtttcaaggatgacgttaaggaagttaagcaaggattcgattgtggtatcaccattgaaaacttcaatgatatcaaggttgacgatcaacttgaagcctacgaaatgcaagaggtacctgttaaataggcatcttttttcacaaaaaggagcttaattatgaaacatagaattggtcgtgtagaaggcgagatcttacgtgaactaactaaaattttacgtaaagatattcgtgatccacgtttaagtgatattactattacagctgtagaatgtacaaatgatttgtcatatgcaactatttattacagcttgttgaccgaagatccagcaaaggaaaaggaagtagctgaaggacttgataaggcaaaaggaatgatgcgtcacttgcttggtcaaactttgactgtttataaagttcctgagttgatttttaaacgtgatacttctgttgcttatggttcaaagattgataatttaatcaaccaagtaaagaagcaagatcaagaacgtgaaaataagaataagtaaaaaggcgccgaaaggcgtcttttattttggagattaagatatgctaaatggaattgtagtagtaaataagccacgtggagtaacaagcagtgattgtgtttataaattaagaaagatacttcaaattagaaaaatcggacatgctgggacgcttgatcctgaagttaatggcgtattaccaattgctattggtcaagcgacgaaattgattgaattaatgcatgaaaaacctaaatcctatattggaagcggaatgtttgggcgagctactgatagttatgatttagatggtaaaactattgctgaagaaaaaataaatactccgtttacaagtaatgaaattattgctggcatggaaaagttgacaggaaagcttgagcaagtaccgccaatttattcagctgtaagagtaaatggtaaaaggctttatgaatatgctcgggaaaatattccagttgaacgtcccaagcgaaaagtcaatgtttatagctatgaattaacacaagatccagaatatgatccattggaaaaaacagaaagctttaattttgcaattcgctgttctaaaggaacctatgtcaggtcattagtaaatgatttaggtgaagaattaggtgtacctgctgtaatgactagtcttacgcgaactagtagttcaggctatgacttaaatcaagctgtagatttagaaacaattgaagcagaaatagatactccaggaaaatggcttcagccaattgatagcttttttgctgaattacctcaacttcaactttcgccagatcaatttaaacgggtttcaaacggtgcaagcattagtttaaataccagttatgctaaggtcgctttggtttataatggtcatataaaagctatttatcggcgacaaggaaaaatctatcgccctgagatgatgcttttaaaaaatgaatagcgagagtaaaaaatgaaagtaataacattagattatccgatctctgcacctatcacaaagcaaaaggtaatcttaacgttaggtttttttgatggggtgcatattggacatcagaaacttattaaggatgcaaaattaatagccaaggagaagaagttgccgttaatggtaatgacttttgataagcatcctaaagagatatacaaaaatgatcataaatttgtctatttagaaacagcccgcgaaaaagaacaaaagatggaaaagctgggggtagattatttagtaattattaaatttactaaaaaatttagtcagcttaaaccgcaagattttgttgatcaagtaattatgaaactcaaagcagatacagttgttgtaggttttgattatacatatggtccaaaagatattgctaatgtagaaaatctacctaagtttgcacaaggcaggtttcaaattatggtggagcctaagcaatcaattgataagattaaagttggttccacctatattagaaaggccatccaacatggaaatgttgaattagctgcagctttacttggccagccatatgaaacctcaggtatcattgttcatggttttagaagaggacataaaattggatttccaacggccaatctcgaaatttctggtgctaaagttttacctgctgaaggggtttatgccactagagctaaaataaatggaaaatggcatgatgcaatgactagtgttggctataatgaaacttttaaaacaaatcacggcttaacaattgaaaccaatattttcaattttgatgaagaagcctatggtaagccattgactttatcttggtacaagtttattcgttcaaataaaaaattttctggaatagaagaattatcacgtcaactggatcaagataagcgaaatattaagcagtatttttatgatttagaaaaataattatttaaattataattgatgtgatataatatctttatcaattgaaatctaatattgaaagaaggttacgccattgcgtttttaatcttgcaaaatagcatagttgaattttaataaatattttctcttttataagggacgactgtgcgcttttgacaagattaaacgtagatgggatatcttcttttttgcttaatgaggagaaagtctacacttgtcaagagtgtaggcttttttcgtgaggtgattatatgagcaatattaagatttcaaacctttcttttaagtattcagatagtattgaaaatatttttaataatctaaacttagatttggatagtagttggaaattagggcttgtcggcagaaatggtagaggaaaaacaacttttttgaatctgttacaaggaaaactgcaaggaacaggagcaattcaatctaaacttgaatttaattactttcctcttaatgtgaaaaataaagaacaattgactctctatgctttagaagaacacgttcaatttgaccaatgggaacttgaacgtgaattgaatttaatgcaagtagacactaatcttatttggcaaccttttaatactctaagtggaggagaacagaccaaggtgttgttagctctatcttttattaataaggatgcttttcctcttattgatgagccaactaatcatttagacgaaaagtcgcgaatacaagtggttagatatttgcaaaagcattcacaaggctatattgttgtaagtcatgatcgagattttctaaatcagataactaatcatattcttgcaattgaacatacagagattcatttatatcagggaaattatgctagttatgaagatactaaagaaaagcgtgataaatttaatcaggagaaaaatgaaaaacttcgtggtcaaatcaaagctttaaatgaaagtagacagcgcattaaaggatattcacttcaatcagagaataataaaaaagctagtgcccataaaaatgagattcatgcagatattaataaaggtttttttggtcataaagcggctaaaataatgaaaagatctaagaacattgaaagaagaatggataaagatattcaggatagaaagggcttaatgacaaatgttgaatctgtaccagaattagagatgaattttcaaccaaattatcattcgactttattagagactcgacatttagatctaaaagttaaagataaaaagttatttaaagacttaaatttaatcattagaaatcgagggattgtttcccttgaaggtaaaaatggagccggaaagtctacttttttgaaaagcattttaaataagagtacagatgtaacttatcaaggaattttaaatttaactaatggcttaagggtttcctatttaccacaagacttcgtagagtattcaggtactttggcagaattttctcaaaaggaacatttgtcttatgagaaaatacttaatgtacttaggaaaatgggctttcctagatcaagttttgagacgagaattgaagaaatgagcattggtcagcaaaaaagagtatccattgctaagtcattagttgaagaggcagacttttatctatgggatgaaccagcaaattacctggatgtgtttaaccaagatcaattaattgatgttttaagaaagacaaagccagcaatgttgttagttgaacatgatgagtattttattagtcaagtagcaagtaaacggatagaattaaagatagttgattagtaaacgatatagagagaataaaaatggcatttgattataaaaaagaatataaaaatttgtatcatcctaaaaagcagcctgaaattattagggtccctaaaatgaattatattgcagtttcaggaagtggagaccctaatcaggaagatgggacttatcaaaaggctttaggattactttatggacttgcttatactatcaagatgagtaaaaaaggtgagcataaaattccaggatacttcgattatgtagtgccaccacttgaaggattatggtggtcaaaagatcagcagaagattgattatgctcataaagaaaattttgcctggatatcaatgattcgattgccggattttgttacaaagaaagaatttgattgggcaattaagacagctactgagaagaaaaaacaagatttctctcaagccaaattttttacttatgatgagggactttgtgttcagataatgcacaccggtagttatgataatgagcctgccacaattgaagagatgcatcaatttgtaaaaaaagaaaattatcagatagatattcaaaatccacgttatcatcatgaaatatatttaagcgatccaagaagaactaagactgaaaggcttaaaactgtaattagattaccaattaaataattaaggcaagcacttgttgcttgctttttttataaaaaataaatttaattagcactctacttgaacaattgctaagttatggtatcatattaattgttagcacaagagaaagaagagtgctaatgatgggggcgagaaaatgttgactgaacggcaagaacttattttaaagactattatcatggactttactcagtctcatgagccggtaggttctaagaccgtgatgaatcaactgcctgtcaaggtctcaagtgctacagttcgaaatgaaatggcggcactagaagaaaagggactgcttgaaaagactcactcttcaagtgggagaattccttcgactgctggttatcgatattacttagatcatttgattaatccagtaaagataccagcatccgtctataaccgaattatttatcaattagaccaaccctttcaacaagttaatgaaatcgtacaagaagctgcaaaaattctgtctgatttaactaattacactgcttttgccgcaggtcccgaaactcgttcggttaaagtaactggttttaggatcgttcctctttcaagccatcaagtgatggcaatattagttacggatgacggtaatgtaaagaatcaaatctatactttaccgcatcatacaaatggggaagagattgaaaaagcagttcgactaattaatgatcaattagttggaaagccacttagttcagttaatgaagtgttacttaagagaattgcagatcatctggttgctggaggctcagcacctgaaattttggatttgcttcaagatgttattaaggatgctgctagtgagcaaatgtatgtagatggtcagattaatcttttgagtaattatgagagcgatgatttagctaaagttaaatctctctacaaattaattgatcaaaatgatgctatttcaagcttgattggttttaatcctaaagatgaaattaaaaatgattcaaagtcgaaagttcaagttaagttaggctctgaattgcaatcagatttacttgaagattatagtttgttgactgcacaatatagcgttggtaagtacggtaaaggaacaatagcactacttggaccaactaacatgccatactcgcagatgatcggattactcgagtattttaggaacgaactagcaaagaaattgttagattattatggtagatttaagtaaggaggttagctgtgagtaaagaagagtttccgcatgaaaaagatttaaaagacgaggtgaccccggataaggcaccaaagaaagatcccaaagcagcttcgaaagaggaagttaaggaagatccagcaaaagattatgaaaaagaaatcgctgaattaagtgctaagaacaaggatcttgaagataaatacctacgtagtgaggctgagatccagaatatgcaggcacgttatgcaaaagagcgtgcacaattgattaaatatgaatctcaaagccttgctaaagaagttttgccagcaatggataacttagaacgcgcgttagctgttaaggcagatgatgaggcagctaagcaactccaaaaaggtgttcagatgacgctcgattcattagttaaatcaatgaaagatcagggaatcactgaaattaaagccgagggtgaaacttttgatcctgcactccatcaagctgttcaaactgttgcagcagaaaacgatgatcagaaggatcacgtagttaaagttttacaaaaaggatatcaatataaagatagaacattaagaccagcaatggttgtagtggctcaataagaaaggaagttacatatatgtcaaaagttattggtattgacttaggtacgactaactcagctgttgccgtacttgagggtaaagaacctaagattattactaacccagaaggtaatcgtacaactccttctgtagttgcctttaagaacggtgaaattcaagttggtgaagttgctaaacgtcaagctatcactaaccctaacaccattgtttcaattaagagtcatatgggtgaagaaggttacaaagttaaggttggcgacaaggagtatactccacaagaaatttcagcctttattttgcaatacattaaaaagttttctgaagattacttaggcgaaaaggtaactgatgcagttattacagttcccgcttatttcaatgacgcacaacgtcaagctactaaagatgccggtaagattgctggtttaaatgttcaaagaattatcaacgaaccaactgcttcagctttagcatatggtcttgataaggatgaaaatgatgaaaaagttttagtatacgaccttggtggtggtacttttgatgtttccatcttgcaattaggcgatggtgtcttccaagtattatcaactaatggtgatactcaccttggtggtgatgactttgataagagaattatggattggttaatccaaaactttaaggaagaaaatggcgttgacttatctaatgataagatggcattacaacgtttaaaggatgccgctgaaaaggctaagaaagacttatctggcgtttcatcaactcacatttcacttccattcatttctgctggagaagctggccctcttcaccttgaagctgatttaactcgtgctaaatttgatgagttaactgatgacttagttcaaaagactaagattgcttttgacaatgcattgagtgatgctggattaagcgtaagtgacatcgacaaagttattttgaatggtggttcaactcgtattcctgcagttcaaaaagctgttaaggaatgggctggaaaagaacctgaccactcaattaaccctgatgaagctgttgctttaggtgcagccattcaaggtggtgttatttctggtgatgttaaggatatcgttttacttgatgttactccattatcacttggtattgaaactatgggtggagtcttcactaagttaattgatagaaatactactatcccaacttcaaagagccaaatcttctcaactgcagcagataaccaaccagctgttgatgttcacgttcttcaaggtgaacgtccaatggcagcagatgataagactttaggacgttttgaattaactgatattccaccagcaccacgtggtgttccacaaattcaagttacttttgatatcgacaagaacggtattgtaaatgtatctgctaaggatatgggtactggtaaggaacaaaagattaccattaagagttcttctggtttatcagatgaagaaatcaagaagatgcaaaaggatgctgaagagcatgccgaagaagacaagaagcgtaaggaagaagttgatttacgtaatgaagtagatcaattaatcttcaccactgagaagactttgaaggaaactaagggtaaagttcctgaaactgaaaccaagaatgttcaagatgctttggatgctttaaagaaagctcaaaaagataataacttggatgaaatgaaggaaaagaaagaagctttatcaaaggctgcccaagatttagctgttaaactttaccaacaaaatggtggtgctcaaggtgctgctggtcaagcaggtcctcaaggagcacaaggtggtcaaccaaacaatgataacggctcaagcaacggtcaaggtggttcaactgttgatggagattttcacaaggtagaccctgataagtaaaaagatttataattgaatcaaacaagaaaagaactgcgtgattgtagttcttttcttttatgaatgaaggagttttcagatggcacaacgtgattattatgatgtgctgggtgttgataagaatgctagtgaaagcgacattaataaggcctaccgcaaactggcaaaaaagtatcacccggacttaaaccatgaacctggcgctgaagaaaaatacaaagaagtaaatgaagcatacgaggttctacatgataagcaaaaaagggctcaatatgatcaatttggtcaagccggcgtaaacggtcaagctggttttggcggtcaaggttatggtggctttggtggccaaggtggctattcatcgcaaggatttggtgattttggtgatatctttggtgatatctttggctcagcctttggtggtggacgaagtcgagtagatccaactgctcctcaaaaaggtcaggacctagattatacaatgacaattgacttcatggatgcaatcaaaggtaagaaaacagatattacttatacaagaagtgaagtttgcccaacttgtgatggttcaggtgctgagaaaggtactcatccaattacctgtgataagtgtcacggaactggtgtcatgactgtaactcgtcaaacgccacttggtgtcattcagcagcaaaccacctgtgataaatgtggtggacgtggcacgatcattaaacatccatgtcagacttgtcatggcaaaggaaccattgataaaaagcaaaccctcgaagttaaggtcccagctggtattgataatgggcagcaaattcgcttaagtggccagggtgaagcaggtaaaaatggtggtccttacggtgatttgtatattgtctttagagttaaaccaagcaaggaatttagaagaaatggtactactatttatagtgaagcaccaatttctttcgctcaagcagctttaggtgataaaatccgcgtaaataccgttcatggaccggttgatttaaccattccagctggtacccaacctaatactaactttaagttacgtggtcaaggtgtgcctaagattaatggtactggaaatggagatcaagaagtaacggttaaggttgttattccaaagaagattaatgataagcaaaaagaagctttagttgattatgttaaagccggtggaggaaacatttcacctcaagaaaagaacttttttgaacgtttaaaagataaattaaacggagaataaaagttaaaagcgtatatctctatgaaggatgagatatgcgttttatttttagtaaaaattatcttcaaaaatattacattaagaattttatctaagtatcagcctttgatataattaatagagcgaaaaaggtgagaacatggatatcaaaaaattacaagactatcaaaaacatattcgaaatttttcaatcgttgctcacattgatcatggtaagtcaacgattgcagatcgtattttagaattaaccgatactgtatctgaacgtcaaatgaaaaaccaattacttgatgatatgccattagaacgtcaacgtggtattaccattaagcttaattcggtagaagtaaagtatcatgctaaagatggtgaaacctatatttttcacttgattgatacaccaggacacgtggatttttcttatgaagtttcacgttcactagcagcttgcgaaggagcacttttagtagtagatgcaacacaaggtgttcaagcgcaaactttagctaacacctatttagcaattgatgatgatttagagattttaccagtcattaataagattgacttgccttctgctgatcctgagatgtgcaaaaatgaaatcgaagaaatgattggacttgatgcgtctgatgctgttgaagtatctggtaagactggtcaaggtattcctgaactacttgaagaaattgttaaaaaggtaccagcaccaaatggagacttgaatgctcctttgaaggccttaatttttgattcaaaatatgatgattatcgcggggttgttttatcggttcgaattgaagaaggaactgtaaagccaggtgataggattcgcattatgaatactggaaaagaatttgaagtgacagaagttggtgtttcaagcccgcatcctgtaaaaaaagatatgcttattgcaggtgacgtaggatacttgactgctaatatcaagtctgttcgtgaaacacgtgttggggacacgattactagtgctgaaaatccaactgaaaaaccacttcctggttatcgtcaaattccaccaatggtttattccggtatgtatccagttgataatcaaaaatatgatgatttaaaagaagcactgcaaaaattacagttaaatgatgcggccttagagtttgaacctgaaacttctcaagccttaggttttggtttccgctgtggctttttgggattgcttcacatggacgtggtgcaagaaagacttgagcaagaatttgggatggatttaattatgactgcaccaagtgtagactaccatgcaattatgaatgatggctcaactaaattgattgataacccagcagatttgccagatgctggcgaatataaagaagttcaagaaccttatgttaaggcagaagtcatggtgccaaatgactttgttggtccagtaatggaattatgtcaacgaaaacgcggagaatttgtaaccatggattatttagacaaataccgtgttaatgttatttacaatatgccattggctgagattatctatgacttctttgatgaattgaaatcttcaacgaaaggttatgcttctcttgattatgagataacaggttatcgtgccaccgatttggttaagattgatatgcttcttaataaggaaccaattgatgctcttagtttcattgctcaccgtgaagaagcacaaaatcgtgctcgtcaaatgacaacaatgcttaagaagttaattcctcgtcaaaactttgaagtagatattcaaggtgctatcggtgctaagattatttctcgtgcaacaattaaaccatatcgtaaagatgttacctggaaaattcatactggtgaccctgatagaagagctaaattacttgaaaagcaacgtcgtggtaagaagagaatgaaagctgtcggaaaagtagaagtacctcaagacgcatttatggctgttcttaaaatgaacgatgacgatataaaaggtaaataattgtaacttctagacgtaccaagtattattggtacgtctttatttgtttttttaaatatatagtagtctctcaataaattatagctaacttgatttagtatgtttttttgcaaaatgtgatagaatttataacagcattaataaaattgaggacaaagacaatatggcaaaagaaacaagaaatacttctaaaaaagcttggatagttcgaattgctgcaattattttattaatcattggtttagggatgatttttaatagtcaaatccgagatttgatggttcgacaaaatcagactactgctttgaagaaattaaacaaagaaactgttaaaaaaaatcaagcaaaaaaaggaatgttcgatttttcaaaagttgaagaaattgattttggaaaggtaactaaatcaagggtcaataatactgctgatgcaattggcgcaatcgcaattccaagtgtaaaaatgtatcttccaattatgaagggactaagtaacgatgccatgtcaactggtggtggtacaatgcgtccagaccaagtcatgggaaaaggaaactatccgttagcaggtcactatatgacggccaagggtgttttattttcgccacttgaagatactaaattgggtgaaaaagtatacttgactaatcttgataagatttatgtttatcgaatttatatgaaaaaggttgtagacccaactgctgtttggctagttgataatactaagcaaaatattgttactttaattacttgtgcagatggtggtgttaatcgctgggcgattagaggaaaactaattgctgaaaagcctgcaacagataagaatttacaagttttcaaacttaaataaagaggatttgcttttgttgaagaagtaaatcctctttaacttttgctataatagaaacttagatgttataaatgatttaggtgaactaaaaataatgaaatggcaacaaagacaagcaagtaatttagatcaagaattaattgaagattatggattaacagatattcaagctaaactctttgcattaagaggtattaataccgcagagaagctagatttttggttaaatgcagatgaaaatgatttggctgatccttttttaatgcatgatatggaaaagtctattaatcgtattaatcaggcaattgataatggtgaaaaaataactatttatggtgattatgatgctgatggaattacagcaactagcattatgatggataccttagaaatcttaggtgccgatgttcacttttttattccggatcgttttaaagatggatacggtccaagtatgagccgttaccaagaaatagtagaagatggtacaaaattaattatcacagttgataacggtgtgactggcgttgaagaagttaaatacgcccaagaacatggcgttgatgtaatattaactgatcaccatacatttcaggatcaaaaaccagcctcttttagtacagttcactgtaactatcctggtcaaaaatatccttttgatgattattgcggagccggagttgcttatacaatgtgtcgggcattaatgcaagatgcaatgccagaactattagacttagccatgatcggaactataggagatatggttaaggttacaggtgaaggacatattatcgttaagcgtggtttagatattttgaaccaaacagagcgtccaggcttacgtgctttaattaagcaggctggtttaaccatggggcaaattacagcaactgatgtcggttttaatatcgctcctagactaaatgctgttggtcgtctggcagatgctagtttggcggttgaactacttttgagtgacgatgaagaacaagctgaagaaatagcaacgaaaatagaagaattaaataatgaaagaaaagagcttacagctgaagtttatgaaaaatgtttagcccaagttaaagaaaaaggttggcatcatcgaaatacgctagtattatatagtccagactttcatgagggtgtgttaggcttagtagctaataaagttgttgaaaagcttcataaaccgactcttgttcttactaaggatgaaaatggtgagttaaaaggctcaggtcggtcaagcaacggctttaatttatttgatactttagagccaatgaaatatgattttttagataaatttggcggacatgattttgcctgtggcttatctttgaaagctgataaacttgaagaactgcgttcacgttttgaaaaaagctttaagccaaatacggatcttgaagtaaaagatttcgattttgaattaaatttaagagaagttacgccagatacattaacggaaattaatttggtcggtccctttggaacaggaaatcccgaaccagtatttagtatcagcgaaccgcacatcaagagcctatttaagatgggaaaagataagaatcatgtgaagtttactgcagaaaaaaataatggcaaactaacaattgtaggttttaataaaggttttttgaatcagaacttgcttccgtttattaaagaattatatgtaactttatctctcaatagctggaaaaacgtttctactgttcaaggaatgctggctggaattgaatatggagcacctaaactagcagtttttgaccaagtgattgacatgaggcaagaagattatgtgatgggatttgctgacaggtatttgatttttgataagaatactatttcttgggctagaaatggtttaggaattccagaggaaaagcttagccttgctaaagattatcatggaaattctgagattgtagctttattagatactccgcgtaatcaacttgaattaaacacagctttagaaaataaatatcatcagctctacctacgttttttatttgataaattaccaattaataatttgcctagtagggatgcttttggtaaaacattgaaatatatttatgctcaccctaacttgactattgatgattatcaggtggtatcttcttatcttggtttggattatcaagctattttgtttattttaagagtattttttgaattacgttttgtttcatttattgatggaaaaattattggcaataagagtcctgaaagcaaaaaattaacagcttcaagatattttactagtgtagcatcacagattaaatttaaaaatcagcttagaacaatgcctagtgatcaactaattagttacgttaaacaatatttaaagtgatcattactagtcataaattaataaaaagttcggtttaaaactgattttaatttgaaaatttggtaaaatatacaggtcaaaggccgttaggtctgatttttcaatgaaagtctaaaatggaggtttctctttaaatggcaattgattttaaagaacacattgcaagtgtaaaggattttccaaataaaggaattatctttcgcgatattaccccaattttgcaagatgggaagctatatcgagttgctactcatgaattagctgagtatgctaagagtcgtggagcagaagtaattgttggtcctgaagctcgtggatttattgttggctgtcctgttgcaacagaattagggattggttttgtaccggcacgtaagcctcataagttgccacgcgaagtagaaagtgcttcttatgatttagaatatggttcaaatgtcttagaaatgcataaagatgcaattaagccaggacaaaaagttgttatttgcgatgatttgatggctactgcaggtactttacatgcaactaaggaattaattgaaaacttaggtggagaagtagttggtgcagcattttatattgaattaactgacttgaagggaagagaacaattccctgatttagatatttacagtcttgttaagtactacggtgcttaacgagacaattaaaacctcagagcaataaggatttagggtttttacatgcaatattaaaatacaaaaagggacagaaaagggacaaatttatttgaaatcttgtatagcttcatcaaactttaaatgctgtttgtgtgtaatatgaagatatatttttcttgtaatatctgaatcaccatgaccaactctgtcagtaattaagcttaatgggtatccttcttctgcaagtttagaaacatgagtgtgacgaaaaatatgtgaagtaatttgctttttccattcttcttctgctacaaattttcttaagaatctacttacagttaatatgcttatcggcccatggctatgtttgttgtgaaatagaaaatcatcatcactttggtctttagcaagtttttgataaattgagactgcttctttaggtagcacaattgtacgatgactagctgcagttttagtaaactcttgtctttcattgcgatgtccttcagtactaattaaagtacctgaaatattaacataccatagcttagtttctttatcttgaaatatattttttactagcaatgcacacccttcacctacacgcattcctgttaagtaaagcattctaaataagtcataaagatcagttctgtttttctttaagcaataatcaaaaacttctttcagctctttgtcagttagataccaattttcaattcgttcttgttttttagcacgatcatttttatagttaattttaactttaagagctggattttcttttgcgtaaccaaattgcattgcaaaatcaaataactttaaaaatatcacatgataatggtgtgctgatccatttgatagttcatctttataaaggacatcatttatataggcattaagctcagtagtggtaatagaggcgactaatctatctttaaattgcttagatagtttataagataagcaaaataggcatctaaggttttaggagctaagccttgctgttttagattatcttcaagtttatctattaatttatccatcgtaatttgtttaacagatcgaatgcttagcttttctttgatagcattttttacttttatttcggctaaatttcgagcgtgtgcagtgtttttagtaattgtggtagaactcttatgcacacccacaaaagagggatcagtatacctaattgagtatttaaatttgccattttttaaaggctctacttgaggagtataatatttaaccatttgatttttacctccattttgctaaaatagggtagacgaaaggcgttgagttaccagctcaacttttcatctagcatatatatgtgtttgctttgaacattggtcagagtgatgaccgacccgtgaagtgttatcagcgctttgcaggtctttttttattgcttggcttggtggatattagactgtagcatataattttgaatagcggtacggtaattaaaattctgctagaatatgagttaggatcacgtgtgcccaattttgggctaggcttgtaagataattaatatcttgcgagtcttttttattattaagctgcgcgctcgtcccgatcgcgcagctagggcgcccgcggtcagattatctcttgttgatttcgtgaatcaaaagaagtaagataatcaatgtgaatgttaattgattcatgtttgtcacctccgagtgacacaggcacagcttgctgtgctaaactcaggagagtgacataacatgaagagagcgggcgccctaagagctttgtgcttaagggatgtctgctttttttatgcttaactttctttaaagttgctttggtgttatcgccttcaacatgttttcgagacgatgatataattattgagaggtgaaaacatggaaaaaagtaaaagtttgaataaaaatttttatatagataaaagtggagcagttatacacattactgaacattataatgaaactgtgttttctgctaaacaggtagatgcaattaaattattaattaaagaacacaatttaaaaaattaataccgaaatctgtaattcgtaatattcctttatttagttcaacggttccatccatattaatttttgaaattttttgtgtgttgagtaaaaggtcttctattagatcatactgttttagatagtgagaagctgttagccacgtattgtcaagaaccttgataattcctaatgagcttaaagtatccaagttagcgtcaatagaagataatatatggttatctgaagttagtgataaatatgtggaaagtctcctacttcctttattaacatcattaaattgaagttcaagaaatcctaaaggaagttgaaaagacggttgattatggatagtttgtaaaagacgagcatcttcaccacttaattgagataaaattgtgggaaatcttggagaaatcaaattattttttcgattatcagcactagatgcaatcaagtttgcaaacattgttcttaagtcatcttctgagattgaatattgggcttcttctattgtcttcattagtaagccccgatttgatgtgtctctgtttttttcagggatcttttgcaaacgttcagctgttttatttgctaagtcttgcacctcagcttctttaatcactttaaattggatgggtttttggaagatccaataaaagattccaccaataccttgacctaaagaatctgcaataggatttagtaatttattaactggctccatgggtaaattgtctaaccaactcataggctacctccgtaattaattattcgggatctgggacgtctggaatatcttctccaaaatcatcattttcattttgagcttctatatctttttctttttgagtaggacttccatccggattgattaaaccatttcgatggagccactcatcttgccccttaacccatgaatcttcggatccatctgggttataaccagcagcatgatcttgtccaggtaagagagggtgaccttttggatcatatccacgttccatgtttatttcaccctggctcttttgttgtccctgtggctgttgagactgttgattattgttaggttggttttgcggttgattggatgaagattgctgattattagaagaaacttgcgttttttgttgagcttgtcgttttacttcttgttctgattgagatttatcttttgaatcagttttttctttatcctttttagcaatctttactgattttttcttactatgctttttatttgattggtgtttttttactttaacggttttacttgcttgctttgatgcagtcgaagtattagcactacaagcagcagtggatatgcctaatagggcacatgcacacatggctagaatatgtcttttattcatattttcctccaagcaccttaggtttaatgtcactggtaatatggacgatcttagtttgatttctacaggcgctgcgcgatcggaacgagcgcgcagctagggcgcccgcggttagattacttgttgatttcgtgaatcaaaagaagtaagatgattagtgtgatgattatttgattcatgtttgtcacctccgagtgacacaggcacagcttgctgtgctaaactcaggagagtgacataacatgaagagagcgggcgccctaagaacttttaaattctagggatgcttgctttttattttacatacgaaaaacacctcatggaatatctaccatgaggtgttttaacgacctgtgtactttacaggcatttcagctatatcctaatgataaatataaaaacataaattttcaataataattacttggttttcttatgtcatcgtcaacttgaacggcagcaatttcatcatcttcaacagtgtcacctgatataattttcttgaggtgaaaattatgaaaattacaaaggcaattgagttagccatgaaagatggcaaaggcatttcacgatcatcgaaacaaccaatggcgacaactattattccaactaatactattagctgctgcttagtagtaccttttaaaggtagtattgcagtaaaacggtgggagccaacagcagaggatttattagctacggattgggaagtttcgggataagatttttaattttattagctaaatccaaaaaatcattaaaattgtctctaaatctatggtcataccattctagtgatttattgcttaatgtaatatcaactgcaacgttgcttccataattgcaattgataaagccattatgctgtaattcatttagaaaagtatttacatcttctagatcataggaagacataaagtctttctttgtatcccaagctgttctattaatataaatcgcttgatgtttagctttaccatatttaatttggagatgatattttttaagcatttgtgttaacaaatactgtgaattttttgttagatctttaaattctttattcatatgttcattattccgccttacatatcaaacccaatgtgaatagctttacccagaatacggcctggattatcttcgtttaagatgatcgggtcgtattttgtgtttataggatagggcggtttttattttggttagagaattcatattagagagcctttttgtaataaaaaagccctctattcaattagaatagaaggctaaagggactatatcccacgtaaaaatgtttaaggagcttaatctctaagtacctatattatgacatattctttccttctattcaagttatttggaaatgtataatttcattagttcatcacttattgctttcatttgctgactagttaagcaaatattgcctgatggatcgtaattatttattttgtgaatgcgtagtttactaatagtagttatgtcagtaagacgaacaaaactatttttattatatttttgatacatatcagtaactttttgaagcttaaagaattcttttgtaaatttgttttgtattgccataaatgaatcatgctgtttatctgttttatcattttgtactttgaattctttattatcttttacatggataattccattatcgtctagccatgtttgttctcttaaatcaagtaatgcgttatttaaattttctctcttggttataagttctttttgcattaacttcattgaatcaaattgcttattaagaaatgaaagtgtttgattaaatatctctttacccaatgagaatctatttgttccattttttgaagttaatggaacaactgttaaggtccgctttcgtggactgtctcttttatctaaaacaacagcaaaatgaatattactaaattcacttccttcatttacaccaaaatttactcgaattactgcaccgcgtttaaaataaggatagggtttattcaattgattgttagcttcttttttaaaaatatatgaagattccgataaccaaaagggcaagtaacgaaacttttgttcgtaatgatatgctctttttgatgaaacatatttaaagttgtttattgctcgatcaaatacatcatttttgttagtcatatatattctccataccgtccgagagggcggtttttattttgcaacatatttcaaaagctcttcacgaacttcgtcaaaattgttaatgcctagactaacggcaatatttacgtaatttgcttcgtctggttcattacctaaagctacatattgctttatcttttcgtgaatcagaaagttattagctccgtgttcactgcaagaatgggctgaaccgatatatttataatctcccacaactgagggatcattcttagcatgaccgatttcatgtgggatcactttctcaatttgttcatctgatagtttttcacgtacgaataccacaccgtggacgaggtaaccatctctgtccatatttacatatcaaacccaacgtgaatagctttacccagaatacgacctggattatcttcgtttaagatgatcgggtcgtattttgtatttataggataaagaaaaacatctttgccgacgtgcttaaccttctttaaggtagctctggtgtcatcgtcaacttgaacggctgcaatttcatcgtcttcaacagtaggttgcttatggataagaacaagggctccgtctggaataagtggttccatagaatcgccttggcatcttagtgcaaaaagttcatcttttttcggttcttcttcaaatagttcatgagtatagccctcaatattctgttcggctaggataggttcaccgcatgcgattgttcctataataggaactcgaacgtaatgcatccctgaggtgtcgatagagttggagggagaataatgtttttcaactaaatctgctttagatactccaaaataattagccatcatctcaattttatctattcgtggatatgaatcggcttgtaaccaagatgctagcgtagtataacttatgtctaaatcactagataacttctttctagtaattccatttcttttcaagtaatgctttatgttatcggccattacttttttattacccaagtcattattatctttattggagtttctatctttatcaaaacctagtagccaagcttcatcgacattcagagctttagctaaaagatgcagtttatcggatcgaggttcagtcttattatttatatactgacttaaatcagttttagttattttaagtttttcagtaaaaaatggacgtgctttttctataatgtctacttgttttagactgtgttgttgcatatattctttaaggcgatcaccaactgtatgtcgatttccagaatataaatccgctttattcgcattttgatttttatccacctttatcacttcctttttttaacaatctaattatatgatatttttgaactaagcacaatttttagttcaaaaaaactgaataaaagtgttgactttgtttttaaacagagtaatataatttgtgtaaagttcaaaaacaaattgaacttacctagaaaggggttatttatggcatttgattttaggaaattaaatggtcgtattgttgaaaaatatggcacacaatataattttgcaaaggcgttaggcttgtcagaacatagtttatctaataaattgaataatcgtgttagctggaaaaccaatgagatagctcatgctatggatctcttagggttagataaatctaaagtagcagaatatttttttaaagaaaaagttcaaaattaatttgaacaagcaggagaagaatagatgaataacaaattacaattatttagttttgaaggtaaagaagtaagaactttaaaaattaatgatgaaccatattttgtagggaaagatgtggcaaccattcttggatatgcaaaggcgcctaatgcaattagtcaacatgtagatgatgaagataaaggggtcactaaaatgatgacccctgggggaaatcaaaatattcaaattattaacgagtcagggatgtacagtctcatcttaagcagcaaacttccaaatgctaagaagtttaagcactgggtaacaagcgaggtgctttcagctattcgaaagactggatcatatcaattaccgcaaacaccagaagagcgtttgaaactagcaatggaagctaccattcatttggacgagcgaatgactaacgtagaaaaagatgttgagtttatcaaaaatacgtccgaaattgattcaaaccaacgatttaaactccgaaaagcaagagatagaaaatcggtagaagtttgcggtggtaagaagagcaatttttacaaagataaaaataaaagacgcaaagtttttcgtcaattagagcatgatttcaaagattcgtttgtaatttcaagatatgaggatttatcaaagaaagactttgatagagcaattaatttcatcagtaattggtatccatcatatccgctacaacaggatattcaacaaatgaatgcacagactgatttggatctataaccgatgtaagaattggagaaataattatgaactacgaaaatgttaaagatgcacttaaagaattagttgctttgaatagccctggtacaacgtttagcaaagtttcaacaattgctgattcaggggtaaagactggagaacgaaagtttgaagtaaaggatcttcaagaatctaattatgaattgttagccaatgtgtgtgacttgcttggtatgaataacatttatcttgatgatgaggaagagtaaattggggacaaaataaaaagcagatctaaatagatccgctatctcttgaagttaccgataacgtcagcaatattagttggcttgactttggttgcgaaggatgaggcagatggcatttccttattaaagttaaatgtcattgcgctcattcccttcatattatcaaacttagtattaatcttagttgctaaatgattttgttcatgtaagtttttagcaatttgtgcagtgttaataccttcaaacttgaatgctggtttcttcaatttgttaccgctaaagctttttatccttagcctctacaagtttcctagtagttcagcatatatgttcaactcaaagagttgctgggcgctcgtgggttaaaaaataaacctatgcgttgcactttcttcaaattagaagcttagctcagagttgccatgccctatggtttaggttttctctgaattcacccagtacaaaagatgattcgcatcatcaatgggcaactgaaaatattataacacagtatattgtgggaacaaaggtgcgagatacaaaatatgtggaatgaaattgaaaaaatcttaaaagaaaaacatatgtcaatatatcgtttagctaaagaaagtggagttaacgagaatacattacgcaattataaaaagaactattcgaatcctgacggtgttgatccgagttttaaaaatatatgcaagattgctgatgctttgaatgtttctcttgatgatttacgagacaaagaaaggtaaccgacaaaggccagcaatactttattaataagtttttgagagatgaggaagagtaaatgaaaagatacacagtgacatctaagcctattgaagcaactgaaacacttaaacaaattccaatagctaaagaagttattgctgttttaagaagccatgatcttaattatgaagatgcaaaaaaagcacttgattgtgcaaaccaagtacttttgaattatttgcttgacaaaaagatttagttgttattaagccaatcttttacgttttgtccagcatttttagttttctcttgttctttttgatactcagcatattgttcagcattagcaccgactacatagctcgtttcatagtcagctggttcatctgaatttactaatttagtacctacatgaagaagcgtccaacccttttgtagatattcattagcgtgctcgtttgagtaaatatcatcaaattcaagagtaaaaacaatgtttttcatgacttaatcatctccttattatcagatgatttcagtttagcagaaagtaatgaatgatgaggaagagtaaaagaaaagagcagcttgaaaaaactgctccgacagaaataagagaaacagataatgtttatctcttaattgtggtaattatcctaataactattattctttgttgcctttttcatattccttttgatctggttgcatttctgctttctctcctagtattttttgccatccgttaatatgataaataattttatatttttcgtatttatgtgggtggaagagacggcgcttggctattcgaaaagagattccgatagaagtgattgaatttaattgctctttattagtaatcacaacaggtaaatcgaatctagtaaaagagttggctttaaaaattccggatttttgatcaggaatgtcaagtttataaaatgtatcacctacaacatgaataatatctttttcttttgaatttatataagtctttttagttaaaagagatagggaattatcagttgcaggatcaaaagcataaaggttgaaaaaagctagatcgttttttgaaggatttataacagtaatattagcaagaaaaacttgattgtagggtgctataggctgaaaatctttatccatggccataacggtagaatcttgaacgggaacaatattcggggcccaattaatcgataaaacttgtctgtttgaccaaagcgtatagagagaaattaggaaagaagaaatggcaaatatattatctccgatccatggaaaaatatattttgatatagctctacagatactagctgcattttgaagaatattctctatgattatcatcaccttattatcagatgattttagtttagcagaaagcgaggtgaacgaagtatggaagaaaagaatgacatttcgattttaagtctaattgaaaagaatataggcaaaataaaagcatcacataattttcaagcaaaaagtttctacatttctacaattgaaaagttatgtgaagcatacgatcaacagattagtgctgaattaattcaacaaaagaaaagacactatgatgaattctttaaaaatgctgggattttacccaatcagccaaaagagagatgaacaaagtatggatataagaagtgcaataattcaagcaaaaaagtttggcggagtaatcaaacgagatggaacatatttttatccaactgacgattttggaagaacaattatttataacgaagatggaaaaattatctctcctggttgggaaccatgtcttgaagagttaatagcttctgattgggaagtaagtttattaaaaattaaggaaccaaccaaaacagaattaagcaagtggagaaaagaactaattgaaaacctaaaaaagaagcctagttaaggctcctggatcaattatttagggaagttatcgtgaatgtttataccactaattgtgttgcttccatatataagtgaaatatatcctgatttttatagtgaattaagtgtttcaccaaatgattcaggatctaatttagaatcaagcaatatttctctaacttcatatgtagtagttggacgtttagaagaaatatgcaatttaattgcttgaactaatttatcaacgttatccattaaatcatctccctattatcagatgatttcagtttagcagaaagagaggtgaatagtgatggaagagaaggataaagaaaaacagccatcaattaagatgactgctaatggaattaaatatgacagtaaatttcatcacgttgtcatatctaagaatggaaaaatcaaagttgagccaaaactagctaaatttaacaaaaaggaaagtaaagaatgattgaactagcagtagtagcaatgtgggtagtgggattaataattataactttgatgagttatgagaaaacaaaaaacaccacattgaatatagtatcggtaattttaattctcataattacaacaattattgttgcttctttaagtcatagttaaatgctttcaaggtagcaagaacagactcattagctgttttaaaatcgtttcgatcagccccatattcaccagctttagcgatttttgacaaagtatcgttaactaattttttctcttctgaattacaaattggtaatacttgaccagctgatttttgcgcttgtcttagattgtttatgtcatcaaattggttaaggcaagaagctaaatcgcctagaaaattagaaattaaattatttttgaaatcttgcatagcttgatttctcttaagtttttcattttcttgcgcaaacttttgcttggtcaattctaactctttaacagttttgttattacttcgattattcagaaaagtaacaacagaggctactacagcaacaatgatgctaccaatttgactaattaatgcccagttcatttaactatatactccttattaattctattgaaattatagcagaaagcgaggtgagcagggatggaagaaaagaaaattagcatcgataaagaaatattaaaaacgatagaacatactgctaagattgctgcaatgactggtagcaataagaattacggaatttacattagtacaatttcaagcttatcaaatattcttactgttttaagcaatttagaaaaagaaccaccatctaaaatcaaaatttatggcagcaatcagacagcaacagcatttgaagataagggagatgaagaaaatgaagaaaatgaatgatattttaacgcctaaagagattcaaaagaagtacggctggtcatactcaacgtggcgcagaagatgcgaggagtgtcaaatttcgccatataaagatgcaatcgtaatggagagccaacgaagatgtcatgttaaggctaaaaggtttgaagagtttctagattggaagtcacaacaaatttataatgagcagtttgggttagtttaggagtttaaaaatgtataaaacagatattttaatttcaaaatggtttaacaagaaggtcaatgatttcttcaaaacaaatttgagtacaagagaaagtgacatcttcatgttcactggaatcttttcaacattagtaattttcatgattctcttctattgcgtaatcatgccgaacttataggagggatgaaatgctcagtattaaaacaatgaataagcttgttctaaactctaatgtttatcaaataaagcagccgattcaaaaagatagatatacagtgctgtttgaaaaagagttagaaaaaagcccatcgctaacggtaattagtgatggacttacaaaaaatgaatttcatattgattatagcatgtgcgcgataaggcggtgaatgagatggtaagaattaaaaaagtttatgacaagcattatacagtcataaataattcaattctcaatgatacatcgcttaagtgggaagacaaaggtctttttacttatctatggtctcaatctgatgagtgggatttctatgcgaaagaagtagcaaaacatagtcctgatagtgaagataaagtatacaaaatacttcgtaagctagaagaacatggctatttacttagacaaaggcaacgtaataacaaaggtcaactaaaagcaaataaatggctattatctgaaactccaaggcaaaaatggatcaatatttataaaaaacgaaccgataaaaagaaaatacctactaggcaaaatccagaacaggtaaaaccagatctggaaaaacctaatgtggtaaaaccggatctaacaagtactaactgtaacaaatacttacctaaacaaataaagaactttaataaatctctctctaaagaagagaaagagagagaccaggaattaattgatatattaatcaatcatttaaataatactgctgaattgtggcacagagaaccaattactttttctgagaatgaatacagtaagttaattaaagcggtgcatggtaaagatccaagattactaaaagacattgctgagaaaacagtgattaacagcgaacagtatccacaaggctatttgctgaactgtatcaagaatttgccagatatgaaagaagagagtgcatatgtgtgggaaaaagctgaataaataaaatcatgaaagcaggtagcaaaatggagaaatatatttatagcaaatcatggtatggacgtcgaatagtagttaagcagcttgcttacaaggatataggaccgtattttgccggatacatcgaattaaagaagaacgatcctaaggattggttgagacatgctggagtgggagatcaagattatttttatggaattgatccttttactgcgtttccaggttgtcctacatttgcggggtatctattagatgatgaacatcattcttacgttggctttgatacacaagaatttgcagctgcatataaccgaaatgactgcattgaaattttaaaagaggtagcaaaaaaattagcatccctcaataaatagaaattaagaaaggcaagaagaaaaaaatgggaagatacaattttaaaaattatgaatacagcagaaaagacaatttaaacagtaatttagatattaataagctttctaaagagctagttaacaggccgttaaactcatcatatcgaaagaatgattcttacaaaatgggagttgtcttatattttatgagtggccaaacatataagacaccagaatttacagttgacgatatttatgatgcactgcaacgaaataaacgctggcttgatcaagaaaatggcggagcaattaatctaggctatgttgtaagatacagtccttataagttttatgaaaggtcagaacatggtagagcttaagtttgcatggagaaaagaaaagcgtgagggtttacctaaagaagatcaggaagatcttagtttagatcatcagaaaaggcatattgattttcttaaaagacttgaccgaattatcaaagtggaaaagaaaaatggttctttagtaaatgtaccagatagtaataaagatttagttaaaatccagcgtgaaaataatgtgttttttgacgataaaagggaaagtagccttgatccagaaaagctagatgccattatagactgtatcactaaaggcttttcactcactgatacaactcatttagcgcattgtagcgcgacaactgttaagcatgctatgtgcaatgctgggctgtctcttagacctccatttagatatcggcttaaagctatccaaaagggaaaaattgacttttatgcaagaaacactaggcaattaagcaattatactgatctaagctttcacaagttgaaaaacaaggagctattgaagctaaaaggatatcgtttaagcaaagttcataagctttggtatcaaattccaaataatgttttttattcagcaattgatgcagaaactatttatttaaagaaaggtattcatagctttgaaaataagaacctgatagttcaaaggacagaggtgagataattgccgagcaagataaggcatatcaaattttataagtattttagggaatgggtagatacatataaagttggccaagttcgaccagtaaccctgaataaatactatttagttgctaaaaagattaagagcatagcgcctgatctagatcttggagatatgactagagcggatgttcagcgactaattaatatttatggccaaacacatgaatatccaactgttttagatttcttacatcatattcaagcgccattaagggatgcagtttatgagggatggattgcaaaagatcctacttataaggtgcatgccacttcacaggttaagcataaagaaactaggtttaagtatcttgaatcagatcaagtagcaaagttagtaaaggtacttgaaagagatgattcgcctgaagccctaatgtttctatttgatttaaaaacaggcttgagatttgctgaaatctttgggcttaccatgatcgttgatgctttagataattattacgagggatgctaaatgaaaattaaatcaattatatgttgtcgcagatttgaaaaagatccagagactattgcatatagtccagctaatgtagatgaagtagcaaatgtgatacaaacacagaagagtaataatgaaatgcttgtttgcttacctgtttttgtgacaagtgcatatgtactttatgacttggattccaatataacttacggttcaaattcttatatcataaatactaaaccattcggcttcagcaagttttatattccagtaaaagatgtgactttagtccaggaggcagacattgacttggaccatcattaattttatcctgtttttaaaacgatttttctacttcagttagatatttcttcacttctaattctgcatcatttatcattctttgtgtctttttatgaacataactattgtaaataactgttggtattagaattgctgacataattgaattaatgatgagcaagctaagtttaatgaggcagcaacaactaatttcatacgtcatgaagatgcattgagaattattgtaaatcatattaaaaatgctgaatagataaattaaatttgaggagtgggaatgtgagtttattatttagagaattagattgcgataagacatgcgatagagttgatgaatttttaaccgatgacttagagaaattaattctaatgtctggtcgtaatcttactgacttacgttctcctagcttatcgttagcacctggccatgctaatgggactaatcatgctgaagctagcataattcgtggacttgatgcagaagctgaaataagagcgatccatcacaccatttatcatttacccgaaatgtcaaagataataatgcgcgatctttatatctatcagatggagagttggcaagtagccgatgcaattagatatggtcacactcaatacaatgcgttaaggcgacgagcacaattattttttgctgatagttttgatcattggcaaaggtatatgaattgtgaaccaatcattgatttacatcgatataaaaaagactggaatcataccggtaatttagcggaataatagtgatggttgaacggccggaataaaagctatagtagtattgtgagttaattcgaaatgagagcaatgctcacaccactccttaaatacaaatatgtaaggctagtaacggttcgactccgttactggctataggatatcgctaagcttttattatttatttttttgtcaatatttagtttgcacgatacttaggtcttatccgagactgacggtcagtctcatcggcttaacgatatctacttgaagagcttactcatggaaacggtgagctcttttattatgttctcgagttgtggaggtaatatcatgccaagagttagacgttgcaagtatcaaggctgtcatgcctttgccatgatgccaaactactattgcgctaagcacatcgaacatgaggcagagtatcgagcagaacgtgagaagtatcgtaaacgtcaatcatcacgagctacaacttggcactacaatcatgtcactcgctatcgcaactctgttaagtcagagcagaataagttctatcactctcgtgagtggcagtcgcttcgtgctcttgttcttcaacgcgactttaacttgtgcaaatattgtcggataaatcccggaaacattgtcgatcacatcgttcctattgaatgggatcaaagcagaatgaagaatgtagacaatctagtaacgtgttgtagagactgtcacgcaaagaagacacgctgggaacaagaatactatggaactggtcttcataatactttgaaagacgtaccagccattacagatattgaactaattaataaattgatgaatgcgcgagatggcaaataactgcgatctgagacgatttaaattttgatgagcaatcatactcgattgagttttaaattgattttgcccccgcctagtggtgagaatggaagagccgcaccatagccgttttcttgtgtgaaatgttagtttttaaaattttttgaaaggggggcttaaactgacaaacgttgatttatcaaggccgaaagtcccaacgcaagttccaaaatggcttgatgtttacgggaaaaagctctggccaaaactagcaaattatttaaataaaaattctaaagttttacgtgctgatgaatatctattacaacaatattgttcaagttatgatatttatcgccgagcttacgaatcggtaaaaaaagacggtctacaacagaaaatgtacaaaactacagtatctccagtcactggtgatgtagtagcaaaagattttgcaggttttagaaaaaatccagccgtgcaaacgatgtctgatgctttgaataagcttaattctattggcaaagaactaggtttaagtcctcgcgcacgaagcgaaatgttagaactcaatgcacctgaagagaagaaaaaatctgttgctgaatcgatgaaggagttttttaagtaatgaattttataaatcaaggcgaaaaaaatagcgctcgatttttagtcgaacgcttttattatgcatcccttagggatagatttcttgcctattttttatagtaagaaaggattaagtaagaatgggattttttgctgctaagccaaaagaagatgtaattgataaattaaaaaagaaaaagattggtatttagacaaaattattcgtattgattctgttatgtcaaatgataccaatatttctgataaacaactttatctaatggataagcagtcaactgctatggatgaagtttgtaaaattattgataagcgtatcaaagatttgaaaactaattaattgttgatgaggagtttttaataatgactaaagggttattagtatacttaagagagaaaaatggtcataagaaagctgaagcaatcattaaaaggaaagccacggaaaatcctgtcttttttaacattgaatataatatgtttattgatgaatatcatatgacacctgaacaatttttaagtagtgataaaaatgaaaattgatctaacgcaaacacatgatgttgagggtgcttttaatagcattgatttttcttttgttaaaagtaaatacaaagatgatgctacaaaatattgttttgatgttttagagaatccaatacggcaaactggctatttagaaaaattacactgtttcagacatttaagagatttacaacggcaaaatactaaagattttccttattactatgatgtatcagagtttgaaaaagctttaaagattgctagcgtaattcctgatgttgatacacacgaattgctaccgctaatggattggcaaaaatttataattgctgagattaacggctggaaagatcagaatggcgagcgtcgttttaccgatattcatatatctgttggacgtggacagggaaaaacacaaatagcggctattcaactttgtaaagcttatttagtagatacattaggttttacaaataaggactttttagtaactgcaaatactagtgatcaatcaagtaagctttttggttatgttaagaaaatgatggctaaagtcattgaaattgaaccatttaaaacactagctaaaaatgcaggattagatttacaagctaatcagattattcaaaagaaaacaaataataaaatttggaaaatcagttatgaagctgataagtatgatagtacgcataacgttctagctatttacgatgaaactggtgcattaaaaacctatgacagaatgactgatatcacagatggtcaatcacaagtaaagccttatcatcaatttattaaaatcagttctgcatatccagatcctacaagtccgtttcatgatgaacaaaagaaaatgcaacatatcatggaaaaagactatgaacgtaaaggcgataattctttgtgtttaatctggtcacaagatgatcttgatgaaacatataaacctgaaacatgggctaaatccaaccctttgataaatctatctgaggaagaaaaagagcgccgtacaggaaatttaatcaaacaaagagatcaagctatccttaataatactttgcataaatttcaaaataagaatttgaatttatggttaaagcaagatgtagcaagttatttaaatttgaaagatgttgaagcggcaactataaaagattttgaaattgatgatcgtgaagttttcattgggtttgactattcaatgtttagcgataacaccgcaataggttttgtatatccttatggagacagtcagtattatttacaacagttcagctttattccatggcaagctgcaggttctcttgaggctaaagaaaaccaggatggaatagcttatcatgcatttcctgagtattgtcagataactgcacataaggatgggattattaatccagagcaaatctataattggttacttgattttgtaggtaatcataatcttaatgttaagttttttggctacgatcgatttggatcttatcaggtcaaaaatattgtagaatccttaaatgctaatactagctggaatattatggatattcagcaacgcaccagtgcactagcaaacccaacgaagtttttacaagagttatttgtgactcataaagcaaccatacctgatgatcccattatgaaaaaagcattattaaatgctgtaatcaaagcagataagattggtattcaagttgataaagataaagcaacattgaagattgacgttgtcgacgctttgattgatgcactatttcaagggatgtattactttgacgagaatgctgacttaaacaataaagatactgaaatagatagaatgacagaacaacaggtattggattggtttaagaacccaaaatcaggattattaggaggtgagcattctggtcactaaattaaaacaacaactgtggaagtatattgatgtaattttctattttgtgggactggcaggaattacttttggagcttttaagatcaatgaaccattgggttacatcgttggcggtgtagcctttttaatttctggttatttagtggaacttatcgcagcaggcggtgagaaaggaggtggtaagtaatgcctctgttaaagctaaataaatctcactctcaaggcttttctctaaatgatcctgattgggttaacttcctaacaggtggcgaagcacagaagtatgtttctgcagatacagcgcttaagaactcggatattttctcactgattatgcaattatcaggcgatttagccatggttcgctatactgctgactctgacagatcgcaattaattattagtaatccaagcgtaaccactaatggctatagtttctggcaaggaatgtttgctcaactcttactagatggaaattgctatgcttacaggcataagaatacgaatggcgttgatttatcgtgggaatatttaagaccttcgcaagtgcaaccaatgctattgcaagatgggtctggtttgatctacaacattaattttgatgaaccagcaattgggtatatggaaaatgtaccagcttccgatgtcattcatattagattattgtcaaagaatggcggtaaaactggtgtctcaccactctctgctctagtcaatgaacagcagatcaaagacgcttctaatgccttaactttaaaagcattaaagcagtctgttactgctagcgctgtgttaagtattcaacatggtggtttacttgacgctaagacaagaattgcaagatcgaaagaaatttcaaaacagattcatgagtcagacggcccagtagtaattgacgcgcttgaagagtacaagccattagaaatgaaaggcaatattgcaagtcttctaaatcaagttgattggactagagatcaaattgcaaaagtttatggcgtaccagacagttatttaaacggtcaaggcgatcagcaatcctcaattactcaaattggtggtcaatatgctaaatctttaaatcgctatgttcaagcaattattagtgagttaaatgataagcttcacgctaatatttcggctgatattcgttttgcaattgacgcgatgggagaccaatatgcaagtactatttcaggcttagcaaaagatggaacaattgcaggcaatcaagctcgatttattttgcaaaattctgggtacttacctactgatctacctgatccagagaagaaaccacaacaagcaattcaactaattcagcaacaagagggaggtgatgatgatggtaacgattcaaatgaacggggaagtgattccgagtgattatgctgacgtctatgattatttaggctatgagagcattaatcctaaggctattaagcaggctttaaatgacgctggtggatcagacgtaacacttgaaattaactctcctggtggctatgtggacgcaggaagtgaaatttatactgcacttaaggaatatcagggcaatgttacagctaaaattactggtcaagcttgttctgctgcttcatggattgcacttgctgctgaccatgtagaaatgtctccaactgctcaaatgatgatccatagagcttctacaatttctatgggtaacagcgatgatttatctagtgcgttaaatgctttagattcacttgataagtcgtttgttgatctatatagtcaacgcactggtttggataagcaagaagtttacagattaatgtgtaatactacttggatgaatgctaagcaggcagtagataaaggctttgcggacgaaattatgtttcaagatagtaaacaacctgctttagtaaatgcagatggttcactatcagttaagccggatatgattaataagatcaagaacttacttcataatcaatcgaccaagaatgtcgttaaacctctaccgaaagaaaataaaaagaatgatggccgacttcaaaagaagctggctattttatttggaaaggaaaattaagattaatgaatatcaatcaattaaaagacgcgtttgatatggcaggtcaaaaggtacaagacttagaagataaacgcgcacaaatcgttgttgatcttggtaaagatgaatcttctcactctgtagatgaagttaccaagttaaatgaaagcttaaagaatgccaaagtagctcatgaattagctaagtcagcttatgaagatgctagagctaacttgaatgctgaacctgttaacaaaaagccattgcctgttaaagatggtaagccagatgctcaaaccatgaagaaccaattcgttaaagacttcaagaacttagtaacttctggaactactggtgctggtaatgctggtttaactattcctgaagatattcaattacaaattagaactttaactcgttcatttacttctcttgaaagtttagtaaatgttgaaaacgttactacttcacatggttctcgcgtttacgaaaaattagcagacattaccccattaaaagacttagatgatgaaactgccttaattggtgataacgatgatccagaattaacagtagttaagtacttaatccatcgttacgctggtattactactgttactaacaccttattaaaggatactgtagataacatcattcaatggttggttaactgggcagccaagaaagatgttgttactcgtaatgctaagatccttgaagttatggggaaagctcctaaaaaaacaactatttctaagttcgatgatatcaaggacttagaaaacaatactcttgatccagcaattgaaagcacatctagcttcattactaaccaatctggatataacatcttgagcaaattgaaagatgcaaatggtcgttacttaatgcaaccagatgttactagcccagataagtacttaatcgatggtaaacctgtaattcgtattgctgataaatggttacctgatgtttctggatcacacccactatacttcggtgacttaaaacaaggcattactttattcgaccgtcaacaaatgcaaattgataccactaatgttggtgctggttcttttgaacatgatactactaagcttcgttttattgacagatttgacgttcaattgattgatgatggtgcatttgcagttggttcatttaagaccgtggctaaccaaactcaaggtactgctgacactggtaggtagttagaggtgattcttaatgatcacttatcttaagatcactgatggccttaagaggtcattaggatatcttgatgaggatgattctttagacgatggtttaaagaataaaatgtcaaacgccctaattgtcgctgaaagttatgttcagcatgcaattggtactgatgttaaagacttctatatttctgaagaaaataaaccactatatacgttagtttgtaatgctttagctgcttcttatgtgcaaaatccagtaagtattacttctggggctatagttaatgttgacatagtgacgaatgccattattggtcaattaagaggaagatatgctaaagaattggaggatcaagatggtcagaatactaaatcccagtcgtcagactcagagaattgagtttggcaaagaatctgatgaaccagaatacgaccaaaacgataatcccaagcctacaataaccgttctgtggacgactttagcaatcccttatactttgaacacaacgcaaattattcaagctcagggacttaatttagctgaccagcgaatgtatgcagttcgtcatcgcttagatagtttctgggatcaaatctcaagagctatagttaatggcgagatgtatgaggttgttcatataaatccagatgaaaagaactctcccacaagttatgatttagtaacggttaagaaggttgaagatcatggctaaagatatgggagagtttttagataattggattgattcagtagagcagagtatgaagttatcgcctgaagataaggccaagataacaggagcaggtgccgaagcttttagtcaggtgttgcacgaccacacgccacgaagtaatgaaatctatagaagagggcgctctgcgggtcatgctaatgctaagcatcataatcggcatcgaaagactaaacacttacaggacagcattacatataaatctggttatactgctgataaattgcatacgggcgataccgatgtgggctttgaaggcaaatattatgattttttagcaaaaatcattaacaacggtaagcataagatgtctgataaagaattagctaatatgcattttgttgataaggcccaacaaggatctaaaagagcagttgaagaggcagaattgaaagcatataaggaagtgatgaaccatgacagcgataaataacgcatatcaagctattttaaataaagtgcccggcgtagatcgttactataaaaagcgaataacagggaaaattgataacactaaaactgatttgctaatcactccagttattggaagctatgcctgttatggttcaaacatccccactgtagaagttcaagaaatagaagtccaagtttttattggaaatgaaaataaaacagctaatttagacacaatcaaaaactcaattgtgtcttttttagtgcccaaatggagagtgacatatggacctgatgaaggttttgatccagaaactggagagaatatgctcacccttcattttttacgtaattatgaaaggaatttaacctaatggaattaaacggttttgcaagagcattaattgctcctgaagacgataacgcaaagttaaaaacacttgatgaatttaaaaagtatggtcgatacaaggcccaaggtatttttcaagctgatctaaaaactgcgagaggtactactcaaagtaacatcacaggtttgaatccaactattcaaaaagtttatggttctaataccaccgctgagagtgaagttggtgtggaaaatatctcatgtatctttgcagctaatgacatgccttttgatattgcttcattaatgcaagggatggctagagatgaaacccatggaggatataagcgtgctgataaacgcttattcagaggagcatatattgctatttctgaaaatcatggctttccagtttattacgcttttccttattgtacttttacccctggtagtggtgtaaacatgcaaactgatgcagcaagtcctgtaacagttcacgatagttttactgttacaccccaagctcgtccaactgataatttgctttatcaaatttttgttggcgatcctgatcgtgatccggcttggaaaaatgaggaagcaatgttggcttatattgttgacggctttcaacagacatctacaccggccggacctggaactggacattagcaagagcagggtgggagaggtaggaacaaatgaagcaggttcgaatcctgctttttttatatgaaaggaatttagataatgactcaaataactgtagatgcaaaggaattaggattaggttcaattgaagtagatcatagttttggaatgaagcgtaaagctggtgaacttaataaggatatttcccaaattcaattagatgcacaacgtaagttttcaagtgcagtttgtgacatgaatattttgcaaaagcttgataaatccaaagcagaagatgaacgtacactagaacggctagaagataagtacggaacaggatttggttcaactgatcctgattattgggatatgagagttgaagcagttgctttagcaatttcaccgcaagtaaaccaagttactttaacttctgaaactgaacttaaaattacagaaaaatacttagcttttattgaagatttagctgggattaataccaaagccagaaagcaaaaatttgaaaatcaagatttaaataccgatgacattgctgatgttgccaaacgtttagtttttgcaattttggacattaaagaagattcggaggcttctgactctgacaagaaaagtcactctgtgggagataaataaattctggtcagaatttgtcgaagatattgattacaccgaacaagacgctattgttaatggtcatgtttcaccaagtgaaatagaagcttttgatactgaccgttgggcacaaattatggaagctcaaagtcgtaaagatcgcccagtagatgctagtgaatatgctttaagccaattggcacaaggaaaaactagaaaggaggtaaataatggcaggtaaaattccagttggaacttttaatacccgtatttctttagacggtgaacaaccaattcaaacgcttaagtctttaaagaatgaagtctcctctgctactagtgcatggaaggcgcaagttgccgaactaaaatcagctggagatcagttaggcgctgctaaagctaaatatgaaggactaggcaatactttaaaaaggcagcaatctttattagaacgtaacaagtctgaattaaatagcttaaaagaagcacagagcaaggttgatacatctacagaaaaagggcgtaatgaatacgaacgatattctaaagaaattgctactgctgaacgtaatgtggcgaacgccactactagaattgctaaattaagtcagcaacaagaaaaagctcgtaactcgcttgattactacaagtcaggattagcaagcgcgcaaagtgagctaaagaaaattactgaatcaagtagtgcttatgttggaagacttgaagcagaaggtaaacatgaagaagccaacaaagctaagttatctggattgtctcgtgaatacgacaagttaaatgaagtctacaatattcagtctaatgagcttgcaaaaatagcttctgaagctggtaaatcaagtgaagcttatagacgtcagaaagtacgtgtagatgagacagccacaagtttagctaagactaaatctgaaatgtcaggcttatcttcagaaatgaagaaagctaatccatcaattttttatcgcatgaaagctaagattactggagttaacggtgaagctaagaagacgcacagtctttttaaaacaatctttagtgccagcttttttagtaatatgacctctaatgcctttagttctgcaacttcaggcttaaagtcgatcattacttctggtatgcaattagatggtgtaattggtaaagttcgagcacaatgggcaggattaggtaaaaataaaaatgatactcagatcttagtagatcaaatgggctacttgaagtctaatactgcaatgactggggacgaagttcatcagttacagttaaatatgaatcgtttaactaatggtaatttgtcacatactttagctctgtctaaaagtattgcaaccattggggatgcgactaagatgacttctggcgaaatggttgggctatcaagtgcaatggctagggctcttagtggatctaaagtttcagcaatgcaatggcaaagaatgagtaaacaagcgccgggattaggtgcggctttgtctaaagcggctggaatgtcagaagaagcatttggcaagatggttacttctggcaaaatgtcgactaaacaatttgaagaattagttgaaaaagctggtcaagatggtggtaaagcctttgctaactttaagaagacccaaggtggtgctgcaaaatcgatgcaggactcttggaattcattaaaagctaaaatggctcagccattatttgatgtgaaaacatcaggaatgcaacaattggctgacttaatgcagtcaaagccagtacaagatggtgctgaaatgttgggtgtagcaattcaaaaagttgctaaacttggtatgcaagcactaggctacattgctaagcataaaggcgatattgtaggtattggttctgatcttatgtctattactaaagatattgcaatagatacttggaagactctttctaaaataattgttgatattgctgaagcctttggtttaactagtaagaatgctttaaagtcgaaggaccctctgaaacaattaagagtagtattagataatttagctaaaaataaagaagcaattcaatggatttctaaagcaattattgctattgcagcaattaggaccttaaagccagttgcaaatggactgttttcaattgctagtgggagcgttaaagcatataaaggagttaaagctcttcatgcaggctttaagggcttagacacaattaaggaactaaaaggaccagaaggcgcacttgccaagataggctcgggtgctaaaacagcattttctaaaattagctctgggtttaaaacgattgcaagtgttgcaaaatccacagcttcaaagatgtggtcctcgttcaaagatattttcgccaagataggctcaggcgctaaaaatgcgttatctggtaagtcttttggcggtgcatttcaatctctaaaatctgctggtggattcagtggcttgtcaacagctggtaaagttgctactggtgtagcaggtgtaggtgttgctttagatgctggttcatctatcctatcagcattcaaagataagaaaggatcaatgaagcagtaccaagatgcaggaaaaggaataggttctgcaattggtggcggtattggtcttttctttggtggtcctgctggtgcagcaatcggttcacaaattggtaagattgccggtggctggggtggtaaagcaaccaaagagttccttaatggttggaaatctaaaaagccacctaagaatttctggtctatcgagaatttaggctggtctactaaggacgctttaagcaaagctggaaaaggtatagattcttggtggaaaggaatccaaaaatctaataagaaagcacaagctgaacaaaagaaggcagcagaacaagccgaaaagcaacgtcaaaaagaaaagaaagcctgggataaatattggtctaatgtaggtaaaggctttgaaaaatttggtaaagattccaagaaaaatttagacaaatcagttaaaaatgcccaaaattttaccaagaaattaggacctaatattaaaaagggctatgatacctttcttaaaaatgggcacaatttttttaagaagttcaatactaatttaggtgatttcttcaaatccattcctaaaaataaatatgttaaagcgttccagaaagggacgctttttcaaactgcttataaggacatcaataagcaaacctcaaaatggactaaagactttaaaaagtcttgggacaagcattggaaatctaccaagaagggtgttcagtcttgggctaaagataccaagaaaaattatgataatggagttaaaggattaactaagtcatttaatgcttataagaagaaagccgaaaaatcatggagctctcactggaaagggctcaataaatcagctgatagtacttggaagagtgtcaagaaaggtgcagaatctggcacaaaagatttacttggtaatcttaaaggttacgctagtgaagcagggaaaagatggaaagatcaccataaagctgaactaaatgtttatgatgatttttctagaaacttaaagaaaaatcatggaaacatgtttgaagctctaaaatctacttcaagagacagtttaaataaacttaaaaaaggcttttcggataagtggaatgatataagacgtaataccagtaacacttggaatgatatgaaatctgattcttctaagtggggaagaaacatgaattcatggttcagcaattttggcaaaaattggcaaagaggctggaacaacttatctaagggagtaaatagtatcttctcaaacatgtggaaggctatgcataagctaggtaaaaatgccatgaacggcttgattgatatcgttaatggcggtattggcgccgttaatgatgtaatttacttctttggtggtggtcattctactgttaaaaagctatctcactttgctactggtactggatattttggctctcaaagacgtgcaattactgaaccaacattggcaatggttaatgacggtaatgattcaccagaaactggcaataaggaagctctttaccgtccaatgactggagagtttggtattttccaggggcgtaatactactactatgcttatgcctggcgatgaaattcttaatgcttcagataccaagaatttaatgaatgcaatgggagttgctcattttgcaaatggtggtattggtggattctttagcaatattggtaagaatgtagggaacttctttggtggcatcggttcatggactaagaacaccatggacggcatgaagaagttctttgacttagctaaaaagattgtctctggtccacaaaaatacttagatggtatttttaagtggacaggtgttaagggcttatctcgtggtgcatttcatacgatgattaccaagggatttgataaaggcaagaaacaagtaagtgccttttggaaaaccctttggaatatggtatctagttctcttgatggtgaagcagaaggaggattactaggtgctgttgaaaaatatggtaaagataaaccatatgtatggggtgccgaaggaccagattcattcgattgttcaggattagttaagtatgccttagagaaagcattcggtaaaagctttcctcattattctggagatcagtattcagcttcacgtgcagttaaagatccgcagatcggggacttagtattctttggacctggaggtcgtaatcacgtcggtgtttatgctggtggtggaaagatctggtctgcaatgaatccaagctctggtattggtatggcaaaagtatctgacttccacgaaggagcagtaagctatcgccgtattccaggtttaaagaatgagagcggagatggagacgttaaagcaaactctggtttagagaaatttattaaagggttgaaaccactgaaaggattctttagtttcattagcaagattggtgatttgtttggtcttggtggcgatgagaaagatccaaatggtacaggagctgatcgttggggtgaagacattaaaaaggctgctaaaacaatgcatacctcagtcactccaacagaaatcagaaaaatcatttctatgatcgccggtgaatctaacggtaatcctagagcggttcaaccaggggcagacccagacggagacggatcgggtccagctcgtggattgttgcagtataagactagtacatttaatgcttataaagttaaaggacacggcaacatttatcacggctgggatcaattgctggctttattcaatgattcaaactggcgtaatgatattcactttggagcaggttggggacccacaggacacaaacgttatgcaaatggcggtcttgctaaccagccttctatttttggcgaagctggcttagaaatggctattccattatcagcagttaaatctagtcgttcttatgaattgcttggtaagactgctgccattgttgctgctagagataatattcaatctgttaatactaatactgatggtttaggagaaaagttagataaagtgatagatttgcttactgctattcttaccgcgccagcaacagttgaaactagcataaatgtagataaacaagctttaggtaattcaattaccgaagttgtaaatgcaagaatgcgattgaattcaattaatagaaagaagggtataagtgtcattaggtagattaatttatcatggaacaggttctgattactatggtgctatggtagtttatccattagttcaagctactactaaaagaaatgtttcactcacgtcagttgtgggagtaaatggttcatatatcaatgataatttgaactatacagacataactcaacaaattacttttgttgttcaacgcccgactttctataaagattggtttacttggggcatggactttggcgattggttgacttacaaagataaatttgtaaagtatgaaccattttactttgaaccgtttaaaggctggcactgggaagcttttgtaagtgaaagccctgttgttactccaactaatgaaacttgggctaacgttactatgagcttagcatgcaaacctttcttaattaatgatgaagctattaagtatcaagctgtaccaagtaatccggtttataatcctactaaatggaattcactccctatttttcatatcgtaggtaatggagactttactttgacgattaatggtttggcttatcaatttaaagatacagataatgaattatttatagatagtgagaaatgtttggtttacaaatcaatgacagaattgcgaactagtagagcaatcttaccgaatcatgagtaccctgaattaatacccggtaaaaatactatttctttgagtggtaattattctaagtttgaatatcaaccaagatggaggcgagcaattgtatgattcctcgactttatgaaacatatatttctgactttaatactgaaggtttgggatcacttaaagatttacttagtatttcaattactaaaaatagaaatcaaataccaactttggcaatgacgtatcctattaatgcccctttaagcagagacataactgagggcatggtaattgtggctgatatgggattagaagatgatgaaaagaatcagcaatttagaattgtagacgtatctaaaagcatgacttcaatttcagttactgctaatcatgcatgggctgatttatccaatatccctttaaagaaggatattagtgaggcccatgccagccctaatagagcgtttgatttgatttctgatgcgttagcgtggcctatttcagggttaggttttgctggtgatattccaactgttgcaaacttaggctggaactttaaagagctacgtaatgctaatgcagctatttttggggctgaccaagctggcgatcaaaccactaacacaatggaagctttatataatggagagttcaggtttaacaactattatctgacaatgctgaaacatgcaggtaaagataagggagtagtgattaagtatggtcgtaatatgcagtcaatcactagggatgaaactactagcgatacctataatgcgattatgccgtatgttacttattcgccagaagaaatgccccagccagatggagaaccatttgacggacaagcaacagttcaatatctagctaatggaaaaatcagtctgtttagtacaccatataaaggccacactccaatcggggccattaaaaatggcgaatatttaaagtttgttgctaagactaataagcaaacagtaaatgatgatacttggtataagacagatacaggtggctgggttgatgagcatttagttacctttgataaatctggaaactatatcgttaataagattacagctcaaggaactttagaggtttcagatgatattactggcattattgtaaaaaacgatggtgtgggtactattgcttatgccggcccgggacaagttccactctatacatcgccgtttggtggtcataagagcggacaatacttatcaaacggagcaagctataagatttattggaaagcaaaagatattaatggaaccgtttggtacaacttaggaaatagggatactcaatggatttcatctcagtattttgttttgtcaaaaactggagactatgcaacgcaaaaagcatatggtcgattaagtgttaatggcaatgtaactgttatgtcagggccaggaggaacaggaagcgtagtcaattggaataattgggggcaatatccgatttacgatatttcaactgattctggcggaattaagtggtatcacatcgggcaatcaggtggcagagaactatgggttaaagctggcgacactgtaagctttaaggaaccaggaactgtcgaatataaagaagatgatgcagaaaaagctaatattcagcaaactgcgcaagttcctgtgtatcatgatcccaacggattaacgccaactggcaagtattacagcttaggaagcttgttaagaattaccgctcaatcgagcagtcaaggcaaaacgtattatgaagttggagcaaatcaatggattaatgccgatttctttagctttgcccatgcggaagatgttgcaccgggtgaagataattcaagcgctgaacctgaagtcagcaagcaaacattagagctagatagcactgtgttaatttctaaatttgcaagggttaccaatgcaccgctaagagttcaagccgtagacttatcttcttatggaataggaaatgataagaacaagttgctagcagttgctaaagcttatatgaaagaatacaggatcggttacccaaatatttcgcttactgtttcatatgagcaaatgcaaggcgagtatcaaaaattaactcaagttgacttatatgattatgtgagtgtgttattcgatgaggtaggaatttttgaaaaagctcaatgcacttccataacttgggatcctgttagagaaattgctaccagcattacaataggccagttgcctattagttatgaccatgctttaaataattttgtaactaatatggttgcaaaaaatacaactatggctactaaacgcgcaactcacttgtttggggaattaaagcaagttatggaagaaaatgatcaagatcaaaaggctggattgcttaaattaactaggcagcttggtattgacgatcaagcttggagagatagctatgaccgattacaaagtatgattacttccataaatacgactgtacaagacgtacacaactggattgccagtggtggcgggggagaaattaccgcttatcctaactggcaaaagccaactgaattaagagctttaagtaatggtggcggatatctccgttttaatgctgaaggcttagaatacgttggacgcgatggagttgctagaagtgccatagacagtcaaggtcggctaattgctgaaagaattactggtggtacgatcacaggtgttaagcttgaaggtatcacagtagatggggattcttacattcattcaattggtggcgatggaaaagttgcagttatgtcgggtgaccatggcttttcttacacagcacctggcaaagaaaaagttgctcttgattgggatcaaaactggggagtactaaaaattggtagtcagtacctgtatgcttccgatatagcttggattcgtcagcaacgtggtgggcgaatccattagattgaggtgaaataattgaataatgatgccgttttaacaaaagctctaaatgaaattgcacgtttagagcttttaaatttcagaaaagatgttgtgattgaagaattgcaaaatgagattagaatgcgtgaccaattgaaaggaggcgaacagaatgctccaagcagtgacgttaaacacgaacaaacgaacggcagctctcagtcgcgtggagttaagagatagcgataagggagaaatcctagaatcgtttattctcaatcctgatggaacaccttatgatttgaatggtaaatctttggttttcaatgaaaataaagatggcgataagttcgtatcagattctaatgtcacaattgtagatgcaagaattggacacattacttatcaagtgcatgatcaggttcattcagctagaggtacagcctggtttgatatcattgataaagcaagtggtgctaaagttgattcgactgctgacttctacattgaagtgagagatggattaaagtgtacggtttataacactacttatatttctgatcttgaaaaattaaagcaacaaatggaagctttaattaggcaagctgatggtgaacttaaagctgaattgcagagagcagaacagcaattaaatcaagagttgcagaactttcgtaatcagtacaatgctttgagtgctgattttcagaatcaatttaggaatgcacagaatgcacggcaacaagactacacaaatcaaaagaatgctattaaccaggactggactaataataaaaatcagatctggagtcagtggaacggtgataaagctaacattgataaacaagcccaagacactatccaagcaatcaaagacaatgctaagcaagtgcttgataaagaccaagcagactggaatgcaaaacagcattcttgggatgatacgttcagccgaattgttaaagaatggcaagttaaaaccaacagcttaaacagtactgttcaggatttaacaactaaatttggtaatattatcaatgaagtgattgacttgatgaataagaagttgccagatatgaatgctaaaaccgatgcagttcaagccaaggtaaacgaactaagagcaagtctaggccaaatagattggactagttttgctaaagattcagaactaaaaaaatggatatttaattctgagccaggttggatccagcttaaatctaatatgactcagtgggggagtagtaacgaaatgatcgctgctgctagaatatcttatgatgatgttagtcgaatgaatatttatgactatactggtgttgctggtattgaaagatcaatgctagaagttagcgacttgacacctaataccttgtatagattgttctttgaatgggaaaattcaaagcaattaactaagatagctgataatgattataagtttagagtgtcagtttatgataaaaataatactgataatattttggcttatcaagatttgccagctgatccagtcaataaagaattgttttgccttacttttgatactaataatgtcactgacgtgttcattgaactaaacactggcggattaaatgatggcatccactttacttggaagattggtaattggcttttaaaacccgttcaagagcatgtaccaatagtagccataaaaaataatactgatctcaataccataaagactccaggaatgtaccatgctaggggaactgatgggatagctaattctccaataccagcatggtttgatataacgataaactcagatggcatgcaaaatggaacacaaatgctgcatgctaaaaaggaaaatcaggtatatgttcgtagctggtacaatggcaatacctttactgactggcaacgaatcacaaatgctggcgatttagctactaaattgtcattatctggtggcaacatgcagaagggaagctggattaattgggatgcgcaaagtccctataatgctcatgagggcaatattggtggaattcaatggaatggcgcttctgatagtattaaaatttttggagataacaacgccagcgaaaatctagatctagctattcaattaggtaatgatgattctaatcacatttcttttagacgtgctgatggtgacgaagtagctgctattgacatgaacggtaacttcaccggatggattaattgggctaaagtagcaaatacaggcattaataatccaactcttgggagatatatcagtcaaagtaatacatggaatgacattattggtcaagataatggtaaaaatgcattagctgcaattagagatgagtcaaatggtagtggcaatactataggcaatttctcatcaggtattgtttttggtggcggggacactaaaggtgtgttaaatgttgcctacgataaacctcaagctcgaataatcggcggtaacggaaatggtcctgtatggcataaagacatagcttggaaagatgacctgaaagtgactgtcgtccgtggctttgacgttgctaaaaagcaaaatagtggtgccaaagttgagaacttaaattcacagtggttgattgaccaacaggcattattaccttttgcagaagcaatcaactctattaagggtcaaggatcgtatcgccacgatgaagttgtagacgttaacacttttacaggaattgctaatcaagtaactacgtacattttgacaaacagcaataataaaaatgcaccgcacagtatgattgatgacagtcaaagtgacaatcgaggtacattagtcgtctttaattacgatgggaatgctaaaacacagctttggattccagttggtagttccggaaaaagaatgggattcgcatggcggtattgggaaggtaataacgttccaggctggaatgtattctacgatgctattacatccgttagaagcagtgttgatgcactaagacaagatgtaacagctaacaatgtaaatctaacccaatttcaaaagcgtgttgatccaaacagcccacaaagcacctttactaatatgacagttgattgcaatcaactaaatcgaactggctactatcacttaattaattgctatgtaaacaatgggccttataagacacatggtcagcactatatttatgtcaaaacggaagttttggatgaacatacaactttccaaactgtgtatgaaggtgataacctgtatgggcgtaagatgtacaacggtaagggccaatggcataagtacactaatacaccaatttaatatttttaatccttagtcaaacgactagggatttttttatggaggaatttaactatgacagaagaaattcaaaactcagcagtagacaatactgaaactgctaatacagaatcaaaagaaattacaatgcacacctattactggtccaacgaagatgtgccttttagagttttaagaacagctgatgagattacagcaaatcagtatccaattgtagttgctgcaccagatccaagcttaaaagctccaaaatatgactggatgaaacaagaatggattgagactagtgaagaatcattaggtcaacgattaacaacagttgtggaacaactcgaaaatgcgcaaaagagtatcaatgttcttcaagaagcacatcaaactactcttaaaaataatgaatcaactgatacggcgatggatcaacttcaaaagactgttcaaatgagtaaccgtatgatggctacattaagcgctactgtatcggctttaactaaggcttaccaaggattgaagtcagctgatactactgaaactaatcaaggagatgcacaataatgtttgacacaattttagataacttaaatactattcaaaatgaaatggttgcaatgtttaagcaacagtatgagtggggctggtttggcgatgataaagccacttctaattccgttcttcaaggatacgttagaactaacgctttgacaccagacggctacaaagaaatcacaggtgaggactatgaccaagctgaaacggtgcttagtcaacctcaagcttaatgaccttcaggtaattattgcaataactatgatcgctattggcggctcactttggtacgatcgtcattatttcttttggccgcctaatttgcaaagcgcgctcaatgactggcgaatagatatttttattttgctagttggcatagtgctattttttgctactgcatttagacctgacgataccttattaattcgtacgcttttagtagtatgtggaggtattgtattaggcttggcattcttgcaattaggacacattatctttacatctgaattcagaatgggacacaccgtcattggcgatgtagtcctttttcttttgattttgcatgtagctcatgatcgctaggaggtgcttcgcttgcatgtagacctaattatcggtgctcttggaacattcttaggagtgctaataactgcatataacgcatatcataaaaacaagcgagatactttccaagatattgtcgaagaattaaaaagcgaacgtgacgattacaagaaacaggttaagcatctacaagaagagaatgaaaaattgagagaggaattacgaaaatgagattagatattaatttaatttgggcaattgtagttttattagtagctggaatggctactgcttacagcatgaataagcagaaattggaaaaattaaagctcactcaccctaagcttgcgacagttttagaaacagcaggcgagttagctttaaaggcaactacttatcaagcatcccttgacgataaagaaggctcaaagaagctaactgacgcgacagatgaagtctatagtcaattagcaaagctttatccaaacgtaccaatcagtcgcgatacagtacgcaattatgtacagcatatgtatgacagcgaagtaaaaaacgctggtcaaactaatgttgctacaaaaattgatggcaataaaatagctgacctaactagtacagctatggtcaatggacatattgatgctagtaagttagaaactaaataactatgtgcacctataatcaatatatttttaattcattcaggaaaggcaactataaacatggcaagagaaatatttgtcgatttatcaagctttcaaaaagatctaacagtagacgactacaagaagttaggggtcaagaaagcaattgtaaagattagcgaaagcactaactacgtaaacccttatattcatgatttagttgataaatcagcagcaggtggagttaacgcctttgcattttaccactttggtcgattcactaatgatgcgcaagctgtcaatgaagcaaaatactttattgacaattctaaggctaagattaatgtaaaaccgaagactttaatgattttagatgctgaaattaatggtatgcctacaagttcagtaattgtctttttaaaagccttacgagatgcagggtttaggactggattctataccggaaagaacttattagctagttttgacttagaagcaataaagccatacatggatttcttttggctagcatcatatccaacagttgcaccagcagataaaaatcctgattttaattactttccatccgctaaatatgtagatgcatggcaatatacagacaatttacttggaatgaaggtggatggatcaattactgtaactgataacggtaatgatgtttttaatgctagtgataatgctaacggtagcgcatcttctcaaccttctaagccctctattaaacctacacccgctcaacctaagacgtggactgatgtgcaaggtatgacttggcacgaggaacacggcacgtttgtcactggtggagcaatcaaccttagatggggtgcaaccacacaaagcgcaattattactactttaccagcgggttcagaggttaagtataatgcttgggctagggatacagtaggtcgtgtatggttacaacaaccacgttcaaacggtcatgatggatacttagttggccgtgttggtacagaagcatggggaacatttaaataatttgatataataggactgaccaaagctaaggaactctaagtgagcttagcttatgtaacctagtttagtaggactgactaggtgcattctcaatcctacaatcgaaaaagccactctggagttaattctctggagtggctttttttgtgttattttttgatttttattgacaatgtacgataaagcgtgtattataataattgaaaggagggaaacgatacaggatagaaaggagtaattgaaatgaagaaaaaaagacataagaaaaaaccaagaataaagatgcacttcaaaatcaatctttggttcttggtttacgaaatttccattgaatggaactaataattgaagagagagggaacggaactcccttccttttctatatcttcattttactaagcaaaaaggagttttacaaatgaaaaatataaaaattcaaaagaaatataataataaggaaatgaaatttgaattttatccaaaaagatttttaattgctttaggagcaatagtaattttactcgttctctggaaggtggtattttaaatggctaaaattacagaagcaagagcaaaagctaataaaagatgggacaagaaaaataaagctcgaaaattatatatcaataagcggtcgacttgtaaaagcttcatattgaatctagcaaccgaagaagacttagctaatattgaagaatatatagcagaaagaagagagcaattaggcatctaaaaagggacaaaaaagggacaaataattggcaaatagtgaaattttatgaaaattagtggtaactaattagtgctctgaaacattgataaaacaatgattttccttagatgccaacaatggaacacatttatgttatttacagtcttgttaagtaccacggtgcttaagagctaagaaggccaattaaggcctttttattttgctcaattttaatcggttttgtattaatttaataaaaagcgcataatagttaatgtttgtttgaaagagggagtgttttagttttttatgaaaaaagacaaatccgtcaaaattggattaaaaactctagttttgatgatcttttcagccatttttggctttagcaattcattaactgcctattatcaaatggggtatgcaagtattgtttggtatattataaccgcaattttattctttttgccttctgcacttatttttgcggaatatggagcagcttttaagggagttaaaggtggaattttttcttggcttaaaggatcagttagtgaaaaaactgcatttattggtacttttatttggctagctgcttgggttgtttggctggtgtcatcgactcaatttttcttggtatcagtgtcgactgcaatttcaggtcatgatacaacgcaaaattggcattttttaaacttgtcatcgacacaattattgggaattttagaagtaatatttttagtagtagtgactttttttgccgctaaaggtgtcgataaaattgctgctgtaagtaatgttggtggcttttttactttagctattacaattggctttactttagtatctattttagttttctttttgaatcaaggacatctagcagaaccgttgactgtgcaatcattagttcattctcctaatccggctttccagtctccaattgctgtggtgtcattcattgtttatgcattatttgcttatggcggtttagaaacttcagcgggagtaattgattctgttgataaacctgaaaagacttttcctaaagctttgattacagctatggtctggatgacagctttatatgtcttgaatattttaatgtgtggagttgctgcaaattggagtagcgaattaagtggcaaaaatgttgatttggccaatgtggaatatgttttaatcaacaatttgggagtagaaacaggaaaggcttttggactttctcattcagcttccctaacactgggtgctacattttctcgttttgccggattagctgatgtattggctggaatttcagcagcatttttaatggtttattcacctgttaaatcgtttattgaaggttgtgatcctaaacttttacctaaaaacttggttaaattgaataaacatggcatgccagaacgttcaatgtgggttcaggcggtgattgttagtgttattatcttatttatttcttttggtggtaatgcagcaggtcagttttatactattttgatggatatgatgaatgtttcatcgtcagcaccttacttatttttgattggagcttatcctttctttaagatgaagcaaggaattgatcgtccatttgtatttattgagggaaagaagcgtgtctggacggtaacaattgtagtttggcttgtagttgcaattggtattatctttacttgtgttgagccactctttactggagattatgcaacatccttctggactgctattggaccagtagcctttggaattattgcttgggtatattattcatatcaagaaagaaaaagtattactgtagtggatgaagaagaataacaaaaaaagaagcatctatagtttaaaaactaagaagcttcttttattttgggcatttttataaaattggtgatagtaatcttgagaaatattgtttaaacttacgccaatgagattgtttattaaagtattgcttagttaataatgttgactcttttagatctttttcaaatatttcttttaattcagttgcaagggcaggattgtatgtaaaagcatttacctcaaaattaagctggtaactccgaaaatcttgattagccgaaccgactgaggcaatattagaaccacttacaatagttttagcatggatgaagccattatcatacttatatacttttacgccatgattaactaagtacttagcgtaatattcggttgctcgataaacgaaagcatgatctggcatagatggaatcatgattcgaacgtctacaccactctttgcagcaataattaaggcctctaagatggagtcacctggaattaaatatggtgtttgaatgtaaacgtagttttgtgcttgcgcaattatttcttcataagctcgacgaataccaaaattactgttgtcaggacctgaagaaacaatttgcattggaactaaatttttttcctggacaacttttaatctgaatttttcaattaaattatcgacactatacgtaggaagatgggatttacgacaacttgtattccaatccattgcaaacctaatttccatcaggagagcagcttgtcctgttactcgtaaatgcgtgtcacgccaatgaccgaattttttgcttcgatcaacatactggtctccaatattaaaaccaccaatataaccaatttgattgtcgatgataaccagttttcggtgtaaatgatagttagcacgaggggtagtaaagaaacgattaccagctgttgaaatgaatggttgagcgtttccacctagttgtcgaagtttattgaaaaaagaaggttttgtaccgcgagagccactagcatcgtacagaactctaactttaacaccgcgattagcagctttttctagtgcttttagaacttggttacctaattggtcatcataaaaagtataaaattcaatattaatactactttttgcttggtcgatatttttgataagatttttaaataaaacttttccatcaataaaagtttctacttcattgttaaaggtcaggagggcatcatcattatttaaatttaattcaacaagtcttcgtgcccggggattttgatctttattaggtaatagatcgtgtaattttaataatttattttgctcatttaagaattggtctcggaatttttgctgttcagctttaattgaaaaaatatcatcatgagatagttgacgaccagtgaataaatatagaataaaaccaatatatggtaagagcgatagaattaaaagccaagcccaggttgaggcaatatcacgatggctgcgaaaaactgtccaaatagctaagccaacattaattaaccaaagtatttcaataatgcgtcttatgatatcccaggttaaaatcattaaaatccctccaaattgtatagataattaattctaccatatcttaaaatatacaaaatatagtatttgtatttaccaaagcactaaatatatgataatttaaggtataatatgcgcaatagaaagaagaaagataatggcaactttagagcaaccatacttggatttactaaataaaattatgattgaaggtcatgataaggaagatagaactggcacggggacaagaagtatatttggagctcaaatgcggtttaatctgagtgagggttttcctattttaactactaaacgagttccttttggtcttattaaaagtgaattgttgtggtttttaagaggagatactaatattcggtttctattagaacacaataatcatatttgggatgaatgggcgttcaaaaactgggttgaaagtgatgaatatcatggccctgatatgactaattttggactcagaagtcaagaagacgccaaatttaagcaagtctatcaagaagagatgaagaaatttgatgagcgaatcttagctgaccgggatttcgcagtcaaatttggtaatcttggagatgtttatggcgctcaatggcgtcactggcaaaagcgagagggtggttttattgatcaaattcaaaatgtgattgatcaaattaaaaagacgccatattcaagaagattgattgttagtgcctggaatccagaagatgtaccaaattcagcactcccaccttgtcatgttttatttcaattttatgttaatgatggtcgtttaagcgttcagctttatcagcgatcaggagatatgtttttaggagttccctttaatattgcgagctattctttactagttaatttaattgctcaagaaactggtcttaaaccaggtgaatttattcatactttaggggatgcgcatatttatcgaaaccattttgatcaagtaaaagaattattgactagaaaaccatatgactcgccaaagctttggctaaatcctgataagaaaaagattgaagactttgaaatgtcagatattaaactcgttgactataagcatcatggtactattaaagctcccgtagctgtttagtttatataattgtgagaggggaaggatgagaatgataaggtttatttgggctgaggatgaagatggacatattggttaccaagggacattaccttggcatttgcctgctgatttaaaacattttaaggatttaacttctaatcatataattgttatgggaagacggacctttgaaagtttccctggactgttgcctaaaagacaacatattattctctcaactagtccaactttacaacgtaaatatcaaaataacgcacatgttaaaattttttctcaacttaaagaactaaagaattggataaaggaccatagtgaacagacaattgatattattggtggagcaagagtttttgaagaattcatggatgaggttgatatgattgaaaagactaagattcaccatgtcttcaaaggtgatactttgatgccaaagataaattatgaagattttgaactaatcaatactaaagctcaccaagcagatgagaagaataaatttgcctatgattttttagaatatgaaagaaaagagaaataataggcttataaaagaggctgataatcattatatagatgtaatgatttttggctttttttgatacatttagttaccggtaacactttatttaccgttgaaagcagtttcaccctcacttaatataaaaatgttgaaagcgcttgtgcgctaatgatgagggagaaaactatgaatgaaaatgataaagtagcgggtttaccagaacttgctaaaagcgtgatttggatgattaattttggatatttaggtattcaaattgcttttacgcttgaaacatcgcaaatgagtcgtatttttcaaactttaggtgcagatcctacgaagttaggctggttctttattttgccgcctttggctggcttagttgttcaaccagccattggatcactttctgataaaacttgggcacctaagcttgggggaagaagattaccatatttattaattggaatgatttttgcggtaattatgatgctactcttaccaaatatcggaaattttggcttaggctatggatcggttgaggctctagtttttggtgctattgccattgctattttagatgtatctgccaatatggctatgcagccctttaaaatgatgattggtgatatggttaatgatgaacaaaaatcatatgcatatggcattcaaagtatgctttcaaattctggtgcagtaattgcagcatttttcccatttttattaacaattttgggagttgctaatactgctaaaaagggtgtggtaccacaatcagttgtaatctctttttatgtaggagctgcaatccttgttattactagcttgttaacagtaacaaaggtacatgaatatgatcctcaaacttatgcacgttatcatggtattaatgaagaagataataaaaaagatggaaattggtttgtcttattaaaaaaagcacccaaagttttctgggaagtttcattagttcaattattttgctggttctcatttcaatatttatcaacttatgctactggcgcaattgcagctaatgtatggaaagcatttgatccagcttctgttggttaccaacttgcaggtaactggtttggcgttttgactgctgtacaatcaattgctgccgtaatttggtcatatattttggcaaaagtaccaaatgaccatcataagttagggtatggaattagtttattgcttggagctgtgggatatggctcgatcttttttattcaatctcaaaatttgcttatcttgtcatttattttgattggaatttcttgggcagctatgaatacttatcctttaactctggtttcgaatgctttatcgggcaaacatatggggacgtatttaggattatttaactgttcaatttgtttaccgcagattattgcttcattattgagtttcgtactatttccactcttaaaatgttcaatgccagccatgatgctgacggcaggaatttctggagtgttgggggcaatttccgttttatttattaaggaaacgtatggaaactaatttaatttattgtttttcattaaaaatttatacttagagagcaaaaaagaagcagcctactaaaaaatggtagactgcttcttttaattatttatttttcataattggttgatagaacaaatcaattataatagcagcgattaaagctacaattattgttaatccaagattggcgaagttgattttagtcattgctaagcccagtattgcgagagcgaaagttagtaaaacatcaataatttgaacagtcgcaactgactttgatggagctgattgccagaaaaattttctagttctagtgattaaaacaattaacattgcgcttagaacgaggtaaacgtaaaccattgttgatactgtcccttgagcataattatgagagacaaggtaccaaacaaagccaaaaccaattacagtccaaccagctgctaacgagaaagcaattttagctaatttcagcatattccagctttctggtttataagtaatatgcgtgttatcggtaccaatcatcatcgttaccatgttattcatgatcgtgtaaataaccattgcatttagagccattgggatgtagttgaaacataagtagccaaatgtcaaaagcatggttaattctgctgtacgagataatttggttaaagaccaagttgtcattctttgataaacgcggtgaccagcatctagaattttaacaattggagtaagcccatcttctaggagcaccatcttaccacttcgtttggcaacgtcggcggcatttgaaacggcaattccaacttcagcttgttttaaggctggtgcatcattgacaccatccccagtcattccaacaatataaccatcttgctggaagagtttaaccatttttaatttatcttcagggagtacatcagcaattccagctaggtcattaacatcagttttgtcattaaaatcatgaattgaaataacttttccggttaaaccgacttcttttgcaactgcttcagctgtcttgcgattatctccagtcagcataattggtttaattccgcgtctcttaagctcctctagagctttttttgaatctgatctaactttatcgcgtaggataaatacacctgcaagtttattattgatcaaaacagcaactgagcgtccagctgtaaagtcaatatcttttgcctcttgatcagcatttttatcgattaaagatagttgtttaaaagagcctaatttaatgttgtagtttttaatctcagccattgaataaccagtattagaagtaaaaggcgtaaaagagttaggtgtatcaggagtaattcctttttctgctagatattcgtcaatagcagtatcaataatgcttggactacgcttatctgttgcagctcctactagagctaagacctctttatttgggaggctacttaagttgtcccattgagaaacagcggttttattttcagtgatagttccagttttatcaagtaaaagtaagtttaagttagcagcatcttgaattcctgttaagtctgaagttagaactccttctttactaaggcgcgttgcttcaaaggaattagatagggcaaaagtagatggcattgcaactggaatagaagcaataaacatcatagccaagaatggtaacatttcaatgacattttgtcctctaattaaagctgcaattaccaaaattaaagttaaaactccatctaataaacaaaggtagtaaataattctggtaaggagttgttgcaagtgaccaggagctgcagaattgttaattaaattgatagttttacctgagcgagaattacttccagttgcagttactgtagctaaagcatcaccatcaactacagttgttccagcataggcagtatcgccaatagattttttaatagcctttgactcacctgtgatagagctttcgtcaactgtaatttgaccttgaacaatttttacatcagcagctaaaacatctccgcgctttaagctaattaaatctcccacagctaaaaactttgaattaagttgtttccattttccgtttcgttttactgaaactgtaggagttaattcgtgagaaattgtatttaaaactcggcgagattttttcttttgagttgcaccgttaaaggccgcaaataaaagcattagtaaaacaaatagggactggatccatttgcccaaaatacattctaagatcaacgcagcttctaagatccaagcagataagttccataattttgacatgaattctttaaagaaattgaattcaggttcaggtacctcattgagaccgtctttttctagacgttcttttgcctgggcatcggttagtccgtgcaagtctttagtttccatgaaaatcctccattaaatctttttcttaaagtattttagcgcagttcttgctattaagaaaatatcaaattaagatataagatattaaaaaaatagatatcaattaagaagatgaacgataatgaatctaaaacaattaaaatattttctagtggtagctgaagaaagacaaattacatctgctgctaaaaaattgtttattgcgcagccacctttaagttatcagctaaaacaattagaaaaagaaattggagcacaactttttattagaaatgctcatgggatggaattaactgaagagggaaaggtatttcaaaagtatgctgaaaaaattgttgaccttagtttgactgcaacaagccaaattcggcaaattaaagcaggcgaattaggtaaaattcggattggagttatttcttcctgtggaggagttgtaccaaataagcaatttaagaaattaattaactattatccaaatgtatcttttgaaatacacgaagcaaatacttttggaattattgaacaattgcaggatggtattttagatttaggaattgtaagaactccgtttaaccttgaaggattaaattttaaagattttcatcaagaaccgatggttgcagttacaaatgaaaatgattttgagggagagaagattgaacatttaagtcaattaaaagataagccgattattttatatcgtcgttttcaagaaatattcaatcgaagttttcgtcatcaagggattcgacctttctacgcagtaacttgcgatgatgctcgaacagcaattcactgggctgatgaaggactgggagttgcattagttcctaaatcaatagcacaggcatacgcaaaaagtaatattgtctcaattaaacatgctcactggatcacgcatttaaatattgtatggcgtaaagatagacaagttacaccattgatggaaagaattattgaaatgttttaactaaaaaagccaaccaaaacggttggctagaaatttaattgtttttaataattttatggtttaggtaacgctcaatagcctggcgcattaatttgattttgcggggcttgtaaataatgatctttgccataatacgagtcctttcattgtcaatcagtatatttttaagatacaggaaaaatatgaaagaatagtgactttttaaagactaattttagaattggcatttttttatgtcaataacttaggataatgtcctaaaatttgttaattattagcggagaatttttctccgctttttatgtatattgatgatatttgtgagcttttgcttgttgccttaaaaatgactcacgtttccacggatgtgacattggcggaatatattttcttccagctcttttctttttaggctcttgatctatttctggagatatttttgcatttttaggaatctctttgagtaaataaacatgatcatctactgtagctaatagctgtccatttagagcttcaattaccaagcatttggtgcctttcatgaaacaaattaacttgccgtattcatctacagcttgatagagcttattcttaaaagaaatagctgagccactatcaaatactctgccactaagaacagcaagcgtgtaattgattttgcgttcactaggagcaacttcaaaaatagaccaccctttgcgagttttattgccaaacttcttgttaaaattagggacaaactgttctatcagatacttgtttgcttcttcaattgtctttacacttgctaatcttaactcaggtttaagacggctttgaacagtttgattagctctttcaaccatgcctttagcctgtgaaatactagtagttttaagatcaacgcctaaagttttgcaagcatagccaaactgtgtgaggacatctttatgagcagatttagtcttagcagtttcgtagttgaatacagtgcggttatctgttttaaaacagagtgggataccataattttgaagaatttgtttgaagacatgataatagccgtttaaggtttcttgccagtcaaaataagcaccaacaataatgccagtagcgttatcaattgctagatgcaggtaggctctttgagtaccaaaccaaactaagactgaggcatccatttgaatttcttcgccaaaatatttacagcgttcatgacgaggatgagcgtctgccacagccagctgatgattgactgcaacttcaacttcttcttttgtttgcttagggtgttgggtacgccatctttttttcgctaaagcacgcttagtctttttccatggcttaggagatagaatatcttgctttttaaggagagtatagaccttagtgtaagagacgtgaatatcttctaaattttctagtagctcaacaaaatgtttcagattgcaatcttgatatttagagcgatataaggttacaatttgattgttaatttctgtggtgagacaattaacaggtttgcggtctttgttcccatgaacgaaggccgcttttcctttatcttgatattgtttaattcttctatttacttgtctaacagaaatacctagctttttagcagccctatgtttgttcccattatgatcaataagatctttaatgactttatactgttcttcatatttcatagttaaataaatcctcttcatttaatccataacctccaataaaagagattatgacatagttaatatcttattaggacattttcctaagttaacagttaagacattatcacttgttaatcacactttttaagaaaaatgattacgaaacttgacagaattacgatattcaattatatttacatatgttgaatttgcccgttggtcaaatggttaagacgccaccctctcaaggtggagttacgagttcaattctcgtacgggtgataatactgagatatagccaaattggtaaggcacaggattctggttcctggatgtttcggttcgagcccgaatatctcaatatgttaccgtcagatcgttgatctggcggttttattttataatccaggtggtaggatgatagaattttttaaaactcagcatttaattgaaagtatggttagtgaacgcattgtaccaggggtaaactacgcatttattaagaaaaaacaggtgtttacatcaacagtaggttttgctagtttgatgcctgagattgaacaacttagtccatttgcactttatgatttagcaagtttaactaaggtgttagggactactaatgtttttttaaaattaaaagaagagggtaaacttaattttactgagccacttcaagagtttattcctgaatttaaagatgatcgtattcgccttagtcatttattgacgcatactagtggaattcgtggttggattcctaatcgagatgaactagcagctcctgatttactaaaagcaattatcggcttaccagttactgatgaatttgaaacaaaaatgcggtatgcagataccaattttattttattgggattggtacttgaaaaaatatatggtttacctgtccaagatgtaattatgcaggagattattttaccagctaagttgaaggaaacaacgtttcatccaaaagcatctgattgtgtgcctactgcttatactgaacaaggtgagttactgcaaggaattgtacatgatcctaaagcacgtgtactgggtaaggattgtgggtcagctggcttattttcaaacttagaagatctaataaaaatgacgcaggcttatttaggactacgtcatgatattctacctttaaagcaggatacattagctaacttatttcaaattgaaacacctaaaaacgtacatcctcgttcttggggatgggatttacgctttgatccagttgatcagcatccacttatttatcacacaggttttactggtacttttatcttaattgatcgccttaatcaaactgcgatggttgttttaactaatcgaattcatcctagtggacataatcatgtctttctagcgatgagagaaaaaatagttgatacttttctaaaagaaaatatttataaaggctaaaaaaggccactgtcataagcgacagtggtcttttatgttacatacctgctttaataatcttcttttcacccatagttttacgaagtgaaagcatagcagtgtaggtagcaaggatatatacttttttagttggtaattttgaaatttcgtctaataaagcatcattattagtaactgtagtcattaggcctggatcaaatccagaaacttctaatctaaagcccatgtcatgccaacgtcttccaccaactaatacttttttaattttatctttgttgaggccttcatagtctgcgtcccaaatccaagaagtatcaattccatctgcatgatttgcatttaaaagagtaactagagagtagctatctttctcagtgttgagcatatgaaggacttcatcaagaccaacaggatttttgactaaaattaaatcgatttctttgcctgcataattgattaattcttgacgaccaaaaattcgcttattttcagcaaaactttgtgcaacttcttcctcgcttaaaccaaattcacgtgcaacagaataagctgctaaagcattgtagatattatatgtgcccccaataccaatactgtattctttttcacccattttgaattttaagctatttggagtttgatcaataatttgatctacgctgtaagttaattcaggtctatgataaccgcaattagggcagaagaaatctcctaaatttgcataaactcgttcatgataatgtaagatatggtcacattttggacataatacaccatcagtatttactggagctttaaaatcattttcagctttatcatctggtagcttaaagccataaaatacttttttatttggaagctcaactgaggagaaaatacttgcgtccccattagcaataattgtagcatttggggctaatttaattccgtcaacaattttttggtaagtagtataaatttcaccataacgatccatttgatcacgaaaaatatttgttaaaacgaatacgctaggatgaagtaatttagttaccattttgacgtttgcttcgtcaacttctagtacagcaattttctttttggctttcttatttttatgagctagaaatgctgttacaattccttgttgcatattcgagccagatggattagttaaaatatcaccatattttttctttaatgcttctacaattaaagcagttgtcattgttttaccgttagttccagtaacaatgattgtttcatagccttttgctaatgaatttaatacttcaggatcaattttcatggcaaattttccaggaaaactcgtcccgccctttaatacattatgaagaaaccagtaagaagatttaccggctaccttagcgatgcctgattttaaattcatattcttatccctcactttaaaactaaattttactatagcatatcagtaaaatgaaaacgacctttttatttttactgtcaataacttaggataatgtcctaaaatttgttaattattagcggagaatttttctccgctttttatgtatattgatgatatttgtgagcttttgcttgttgccttaaaaatgactcacgtttccacggatgtgacattggcggaatatattttcttccagctcttttctttttaggctcttgatctatttctggagatatttttgcatttttaggaatctctttgagtaaataaacatgatcatctactgtagctaatagctgtccatttagagcttcaattaccaagcatttggtgcctttcatgaaacaaattaacttgccgtattcatctacagcttgatagagcttattcttaaaagaaatagctgagccactatcaaatactctgccactaagaacagcaagcgtgtaattgattttgcgttcactaggagcaacttcaaaaatagaccaccctttgcgagttttattgccaaacttcttgttaaaattagggacaaactgttctatcagatacttgtttgcttcttcaattgtctttacacttgctaatcttaactcaggtttaagacggctttgaacagtttgattagctctttcaaccatgcctttagcctgtgaaatactagtagttttaagatcaacgcctaaagttttgcaagcatagccaaactgtgtgaggacatctttatgagcagatttagtcttagcagtttcgtagttgaatacagtgcggttatctgttttaaaacagagtgggataccataattttgaagaatttgtttgaagacatgataatagccgtttaaggtttcttgccagtcaaaataagcaccaacaataatgccagtagcgttatcaattgctagatgcaggtaggctctttgagtaccaaaccaaactaagactgaggcatccatttgaatttcttcgccaaaatatttacagcgttcatgacgaggatgagcgtctgccacagccagctgatgattgactgcaacttcaacttcaacttcttcttttgtttgcttagggtgttgggtacgccatctttttttcgctaaagcacgcttagtctttttccatggcttaggagatagaatatcttgctttttaaggagagtatagaccttagtgtaagagacgtgaatatcttctaaattttctagtagctcaacaaaatgtttcagattgcaatcttgatatttagagcgatataaggttacaatttgattgttaatttctgtggtgagacaattaacaggtttgcggtctttgttcccatgaacgaaggccgcttttcctttatcttgatattgtttaattcttctatttacttgtctaacagaaatacctagctttttagcagccctatgtttgttcccattatgatcaataagatctttaatgactttatactgttcttcatatttcatagttaaataaatcctcttcatttaatccataacctccaataaaagagattatgacatagttaatatcttattaggacattttcctaagttaacagttaagacattatcacttgttaatcacaaatgaaaacgacctttttatttttacctgcaagatttttaaatttactttatactaattaggataatactagtgaaagtacataaacttaataatggaggaattttgcagtggcgcaattgttttttcgctatggtgcaatgagtagtggtaagtcaattgaaatactaaaggttgcccataattatgaggcacaaggtcgaaaaattgccttaatgacgagtagtgtagatgataggagtggtgtggggacagttgcttctagaattggccttcaccgtaaggctgagccgattagtgaagatttgaatttgtttaactacgtttcagaaatgaataagaatgatgttgagtctggtaatgggactgtggcttgtgttttaattgacgaggcacagtttttaaagaaacatcatgttttagaatgtgcaaggattgttgacgaattaaagattcctgtgatggcatttggcctaaagaatgattttcagaatcatttattcgaaggtagtgaaaacttattgatttttgctgataaaatagaagaaatgaagaccatttgtcactactgcggtcataaggctacaatgaatttgcgaattaattctggaaaacctgtttatgagggtgaacaagttcaaattggcggagatgagtcttattatcccgtgtgtcgttttcactattttcatcccgataaacaaagataaaagtaaggaaggataataaaaatggataaagtaatggctcagttggaaggattagttgcccattatgaagaacttcaagaaatgatggccgatccggaagttattaatgatactaagcgctatatggagatttctaaagaagaagctgatatgcgtgaagtagtacaaaagtatcgaaagtacaagtctgatataaaggaaattgatgataataaagaaatcatttcaagtgagtctgatgatgatttggttgaaatggctaaggaagaaaattctgaattagaaaaagaagttgctaaattagaagatgaaattaaaattttgatgcttcctaaggatcccaatgatgataaagatatcattatggaaattagaggagctgctggtggggatgaagcatccttatttgctggtgatttactcagaatgtatgaaaaatatgctgagactcaaggctggaaagtatctttaattgactcagagccaactgaagtagggggctataagcgtgttgccgttatgattaccggcgataaagtttactcaaaattaaagtatgaaaatggtgctcaccgtgttcaacgtgtacctgtaactgaatctcaaggtcgtgttcacacttcaactgcgacagttgcagttatgccagaatatgaacaagtagatattgatttagaccctaaagatattcgtgtggatgtttatcgttcatctggtgccggtggtcagcacattaacaaaacttctagtgctgttcgtatgactcaccttccaactggaattgtggttgctatgcaagatcaacgtagtcaacaacaaaaccgtgaaaaagcaatgcaaattttaaaatcgcgtgtttatgattattacgaaagtcaaaatcgtgataagtacgatgctaaaagaaaagatgcagtcggtactggggaccgttcagaaagaattagaacatataattatcctcaaaatcgtgtaactgatcaccgaattggcttaactttgaacaagcttgatcgagtaatgaacggagaactagatgagattattaatgccttagttctttactaccaaacccaacaactagaaaagatggctgaagaaaatgcctaaaagtttaaagcagatcaaggaagctgtgttaaaagatagtcctgaaattcgttcagatgatattgactatgtactgggcgaaagattaggctatacgccttcagaatttctactacatatagatgatgaattaagtctagctcaagaaaaacaagcattaaaagatatgaagaaattatgtagagggatatctccacaatatattttgggatatgcttggttttacggttataaaattttggttaatcgcggtgttttaatacctagatttgaaactgaagaacttgttaagttggctcttgaaaatattaaatctggtgaaaaaattcttgatttaggtactggctctggagcaattatggttgctttagtgaagcaggctcaagatcgaaaaattgaaaatttaattctatatgctagcgatattactgatgctgctttacgtgaaagcgaagagaactttttaaaatatgatttagatgttagaacgcgtaaagctaatgttttagtaggtttagaaaagtttgataccattatttctaacccaccttatatcaaaactagcgaaaaagatttgatggatgcaaatgtaataaaaaatgaaccagatactgcattatatggtggagaagatggtttggatttttatcggaaatttgctaagcaaattcgttcgcatttgtattctcatgggcaatttttcctggaatttggctttagcgaaaaagatcaattaaaggacttatttgaagcggaattaccagattttgaaattgagtttaaaaatgacttagcaggtaagccaagaatggttcatggaaggtggaagaaataatggaaactaagattttcagtaaaaaacaaattcctgaagcagttgaactcttgaagaaaggtgaattggtagcctttccaactgaaactgtgtacggtcttggtgctttagcaactaatgaaaaagctgttaaaggagtatatgcagctaaaggacgtccaagtgataatccattgattgtcactgtttctgatgaaaaaatgatggaaaattatgttaatgaagtaccagagcgagcaaaaaaattaattaagcatttttggcctggtccattaacaattattcttttcgttaaagaaggtactttacctgatgctgtaacagggggactcccaactgctgctttccgttgtccagatgatgaactgactcatgacttgattagcgagctaggtaagccaattgtaggtccgtctgctaatacttcaactaagccaagcccaaccacagctggccatgtttatcatgacctaaagggaaagattgctggaattattgataatggaccaacagaaattgggttagagtcaacaattgttgatttatcagtagaaacgcctactgttcttcgtcctggagaaattactcctgaagaaatttcaaaagtgcttggagaagaagtattgatgaataagggtacgactcaaactaagggtgtaccaaaggctccaggtatgaaatatcgtcattatgctcctagtgctccagtcttcatcgttgataaagaagaagatttttcaaagattaaatgggacaaggaaactggagtggccgctttagatgaagtacttgataaaattaatagctctaataaatatagcttaggtacaacgattgataaggcagcacacaacctattcggtgctcttaggtattttgatagtgaaaataatattaagcgcatttatgtgcaaggttttgatcatggaacaattagtcctgcttatatgaatcgtttaaacaaagcagctgctggacatcattttcattaaaataaaaggcatgtagaaaaacatgccttttttcgtacgatttaagaaacatttatctaataatttgttaaaataatgaacgaagtattatttttaaaataggaggccattatgggtaagtttaccgttttgaatcacccgttgatccaacataagttgacaatcatccgtaagaaagatacaggtacgaacgaatttcgtcaaattgttggtgaaattggtggactcatggtgtatgaaatgacacgtgatttgccattgaagaatgttgagattgaaactccaattggaaagtcaactcaaaaagaattagcaggtaaaaaattggttattgtgccaattctgcgtgctggtcttggaatggtcgatggtgttcttcaaatgatcccatctgctaaagtcggacatattggcatgtatcgtgatgaagagactttaaagccacatgaatatttcttcaagatgccaccagatattgaagaacgtgaatgtattattgttgatccaatgcttgctaccggtggatcagcaaacatggctattggagcattaaagaagcgtggtgctaaaaacattcgcttagctgttttagttgcagctcctgaaggtgtaaaggctgttcaagaagcaaatcctgatgttgatatctatgcagcagcagaagatgaaaaattaatggataacggttacatctacccaggtctaggggatgcaggagatagattgttcggaactaagtaattttactcaaaaatcttttgaaattgaaatttttgggtgttatcatttttagtgtgtttgaggtattcagcacaagaagggaggtcacgaagtgaatgagaaatctgtagtcgttaatgtattcggcttgaatttcaatgtaactaactgcttagggggaacgttagtcgcaattgcggttttctttcttgtttggtatttaggacgcaatatttctttaaaacctaataaaaagcaaaatttattagaatatctaattgattttacaaatgggattgttaaagataatgttgctgatgtagatgcacaaaaacatctatctctttatgcctttaccctatttatgttcattttctttatgaaccagttaggtttgttctttgagttttcaattaatgaccatatccttgtcaaatcaccaactgctaacccattgattacaatgactatggcaatgatgacattgttattatcttataactttggtgttcagaagtttggtgctaaaggttattttgcaaattatgcaaaaccagttggatttttacttccaatcaatattattgaggaattcactaatttcttgacgttatcactacgtctttacggtaatatttatgccggtgaagttttactaactttaatcggtggacgttttgcaaagagtgcgggttggtttaccgtcatcgcttcggttccactaactttaatctggcaaggcttctctgtctttattggctctatccaggcatatgtattcgtaactttatcaatggtgtacattggtaagaaggttactgaagaataattttacggaggttttttctatgaaatatttagctgccgcaattgccgccggtttagctgctttagctgcttcctggggtaacggaaaagttatttcaaaaactattgaaggtatcgcaagacaaccagaatctgctaacaacttaagatcaactatgtttatcggtgttggtttgatcgaagccgttcctattttggctatcgttatgggtttcttgattctcttcctgtaatttgcgttttagagataagatcgtaattacgagaaagaagggttgagacatgcaatttatgtttgcagccttaaaattagagttaggagatacgctttactatcttttaatctttgcagctctgctccttttggttaagcactttgcttggggtccagtaacaaagatgatggagaagcgtcgtcaaaaggtgatcagcgatcttgatcaagcagaaagtgaccgtaaaaaggcagctcttcttgctaatcaacgtgaagcagccttgaaagactctaaacaagaggcaacacaaattctttctactgcaaagagaaatgcggaaaagactaagagtagtattattagtcaagctgatcaagaagctgccgcaattagagaaagagcatctaaagatgctgcgcaagcaaaaacagatgctttaaacgaggctcgtgatcaagtagcagatatttctgtcgcaattgctgaaaaagtaattagtaagagtttatctgctgcagatcagaaggacttggtagatcaatttatcaaggggctgaatgactaatggctttaagtagagaagaaattgcttccagatacagtaaagctttgtttgcttatgcacaggatgctaaaaagcttgatgaagtacacgaagatatgaatgtgttgcttcaagtagctaaagagaatcctgatatgctacgcttgttaagcgatccaattattcgaaagaatcaaaaagaagaatttttatcaagttttagtggcgaattttcttctgagacaaagaattttttagaatttcttttagaatatggaagattcaatgccttgactgaaatcattaaagcctttgatgcgctctatgatgaagataaaaatattgcttctggtacagcagtgagtgctattaatcttgatgaggacgaattaaatcgtattagtcaagcttatgctaagaagtatggctttaagaaattgattctgacaaatgaagtggattccagtatcttaggaggtataatcctcaaagtcggggatcgtattattgatggttcgataagaactagattgcaacaaattcgtgagcaattaattgaaaatagataaaagaggtgaaaccattgagcattaaagcggaagaaattagcgctttgatcaagcaacaacttgagaaatatgatgataagctcaacgtcaacgaagttggtactgttacctacgtcggtgacggtatcgcccgtgctcacggtctaaataacgtattatcaagtgaattgttacaattttctaacggttcatacggtattgcgcaaaacctagaagctaatgatgttggtatcatcatcttaggtcgctttgatgatattcgtgaaggcgaccaagttaagcgtactggtcgaattatggaagttcctgttggcgatcaattaattggtcgtgttgtgaacccattaggacaaccagtagatggtttaggtgagattaagactgataaaactagacctatcgaaagtaaagctcctggtgttatggatagacaatccgttaaccaacctttacaaactggtattaaagctatcgatgctttagttccaattggtcgaggacagcgtgaattgatcattggtgaccgtaagacaggtaaaactgctcttgctttggatactatcattaatcaaaaaggccaagatgtcatttgtatttacgttgccattggtcaaaaggaatcaacagttaagaattctgttgaaaccttaaaacgatttggtgctatggactacacaatcgtagtagaagctggacctagtgagccagcaccaatgctttacatcgctccatatgcaggtactgctatgggtgaagagtttatgtacaatggtaaggatgtattaatcgtatttgatgacttgagtaaacaagccgttgcttaccgtgaaatttccttacttcttcgtcgtccgcctggtcgtgaagcttatccaggtgacgtattctacttgcactctcgcttgctagaacgtagtgctaagttgaataagaagcttggtggcggttcaatgactgcgttaccatttattcaaactcaagctggagatatttcggcatatattccaactaacgttatttccattactgatggacagattttcttggaagccgacttgttcttcgctggtactcgtcctgccattaacgctggtgaatctgtttctcgtgttggtggtagtgcacagatcaaggctatgaagaaagtagcaggtacgttgcgtgttgacctagcttcatatagagaacttgaaagtttcgctcaatttggtagtgatcttgaccaagctactcaagctaagttaaaccgtggacgtcgtactgttgaagtgttgaagcaaccacttcataagccacttcctgttgaagatgaagtattgattctttatgctttaacacatggctttttggatgctatccctgtaccggatattcaacgttatgaacttgaattatatgattactttgcaagtaactataatgacttacttgatgtaatccgtacaacgggagatttacctgaggaagctaagcttaacgaagctttaaagaacttcaacgaaggtttttcaatcagtaagaaatagaagaggaggttttttcattggcagaatctctccttgaactgaaaaaaaagattgcttcaatccagaagacaggtcagatcactgaagctatgagaatggtttctggtgttaaactgaatagaactgaaaagctggatcaagaatatactatttataacgataaggttagagcaacagtttctcacttgatgagttcacaaattgtgaagcaattaggtaaggaaactaaagaatataatgaatttggtggctctgccagcatagattatagtaacttctttgatttaggtactcttgcgtctttagttcagcctcgtaaaaaaattaaatccactggttacttagtaattagtggtgatagagggttagttggttcttataacagtcaagttattaagaatatgatgagtatttttaaagatgctgacgctcagaataaagacgttaaaattttggcagtaggtagtgtagcagcacaattctttaagaaacaaaatttaaatgttgtgtatgaatatagtggcgtaagtgatgttccaacttacaatgaagtaagagacattattcaaactgctgttaaattgtatttaaatggcgtttacgatgaacttttcgtttgttatacgcaccacgtaaatacattgacttctgcttttagagtagaaagtatgcttccaatatctgacattgatattaatcataaagatacaatgccaaaggattacattattgaaccagatattgattcagtattaaaaacagttttacctcagtttgctaaatcaatgattttcggtgctattttggatgctaaaactgcagaacatgccagttctatgactgcaatgcagagtgcatctaaaaatgctgatgatgttgtatctgggttgaagacaaaattgaaccgagcaagacaggcacagattactaccgaaattactgaaattatcggtggagcaaatgccttagaataaaatagaaaaggaggtagatgttttgggtaaaggcgaaattgtccaagttattggacctgtcgttgatgtggaatttccactagataaagatttgcctgatattaataacgccttacgtgtcacaaataacaatggtgatactcttgttcttgaagttacactagaacttggtgatggtgttttaagaactatctcaatggaatctaccgacggtttgagacgtggaatggaagttgaagacactggtgctccaatttctgttcctgttggtaaagatactttaggacgtgtctttaacgtattaggtgatccaattgatggtggtcctgctttaggtaaagatgtaaaacgtgaaggtattcataaagaagcacctaagtacgatgaattaagtacgagtgaagaaattcttgaaactggtattaaagttattgatttacttgaaccatatgttcgtggtggtaaagttggtctattcggtggtgccggtgttggtaagacaaccattattcaagagttaattcataacattgcccaagaacacggtggtatttccgtatttactggtgttggtgaaagaacacgtgaaggtaatgacctttactttgaaatgaaggcatctggagttctatcaaagactgccatggtctttggtcagatgaacgagccacctggtgccagaatgcgtgttgcattaactggtttgaccattgcggaatatttccgtgatgttgaaggtttggacgtattattgtttattgataatatcttccgtttcactcaggctggttctgaagtttcagctcttcttggtcgtatgccaagtgccgttggttatcagccaactttagcaactgaaatgggtcagttgcaagaacgtattacttcaactaagaagggttctatcacttcaattcaagctgtttatgttccagctgatgactatactgacccagctccagcaactacatttgctcacttggatgctactactaacctagagcgtcgtttggttgaacaaggtatatatccagctgttgacccacttgaatcaacttctagtgcattggatccagaagttgttggtgaggaacactatcaagttgccgttcaagttcagcatattttgcaacgttatcaagaattgcaagatattatttccgttttgggtatggatgaattatcagacgatgagaaattaattgttgaacgtgcaagaaagattcaattcttcctttcacaaaacttctttgttgctgaacaatttactggtcttccaggatcttatgttccaattaaagagacaattaaaggattcaagatgatcattgatggtaagttagatgatcttccagaagatgctttccgtaacgttggtcctattgaagacgttgtcaagaaggctgaaaagatgggagttactcctaaaaatcctgaagcaaaagcaatgctagaagcaaagtaaggtgatgcgttatggcagatccagaaaagattttaaaagttagcgttgtaacaccagatggaattgtctattctcataatgcgactatggtagcaatgagagcaattgacggtgaacgtacgattatgtatgatcaccttccaatcgttactcctttagctattggtgaagttcgagtaaaaagaacgcatgaaatgaatgatcgcgttgatcatattgctgttaatggtggctacattgaattttcaaataatgaagcaactattatagcagatagtgcagaacgtgcgcgcaacattgacgttgaacgtgcgcaatcagctaagaagcgtgcagaacaacacatgcaagaagctaaagagaaacataacgaaagagaaatgttagaagctgagattgctttgcgtcgtgcagttaatagattgcatgtacgtgaaaattacggcaaataatagaggaaaaagacgaacatcttgttcgtctttttttatggagaaaatcatatgataaaacaagttggagttcacgctgttgtcagtctaattacatatttggtaactattgcattttctttcaaagctgtaaaaggattgagagttgctcaattattcaaaaaaggtcatacttttgaaattcaagtctttttactttttgtttctattgcattaggttttttagtagggcaatttattttagccttagtagatcaatcacttgctttaaagatgcttttttaaggattttcataagaaattgtttagaatggcagttctttatacttgttcttaaagtaaagcagtatttatgttacaatttttaatgattaaatactggaggcactagcgtggcaagagatataggaattgatttaggaaccgcaaatgttctaataaatgtatccggcaaaggaattgttttgaatgagccttccgtggttgctgttgatacagataaagataaagttgtcgcagtcggtactgaggcatataagatggtaggacgtacgccaggtaatattagagtcattagaccgttgaagaatggtgttattgctgattttgatattacagaagaaatgcttagctactttattgaaaaactaaatgtaaaaggttttatgtctaaaccaaatattttgatttgtgctcctacaggggttacttcaattgagcaaaaggcaattattcaagcagctgaaaagtctggcggtggacgtgtatatttggattttgagccaaaagtagcagctgttggtgctggcctagatatttttaaacctcaaggaaatatggttattgatattggtggtggtacgacagatattgctgttttgtcaatgggagaaattgtaacttctcgctcacttcgctgggctggagataaaatgaatcaggctattgcaagttatattaagagaagcaagaatcttttggttggtcaacatactgctgagcaaattaagattcagttgggaactgcttttgaagctgatccaactaagacaatgactgtacgaggtcgtgatatggttgatggtttaccaaaacaggtagcaatcaatgaattagaagtgcaaaaagcccttgaagatggattaatgtcaatcgttgccgcaacaaaagaagttttggaacaaactccaccagaattatcagcggatattattgatcgtggcatcatgctaactggtggtggagctttgcttaaaaatattgataaattaattacttattatcttcaagtccctgttttgaaagctgatgacccactggaggctgtagcaaaaggtaccggtgtattacttaaaaatattgaaaatcaccagagacactaattatgaatagagaaagttttgatttttcattagtaaataaacatttaaaaaaagtgggaaagatacttttgtatttgtttgtgacaatgctcttaggagcatttattggatgcggcgttgcaagcggtaatccttttgcaatcttctttcctagtacatgggttcatttttttgagtttttaagttaaaatgaataaattgttaattgggttggtaaatgtttataaaaagtttatttctccagttttgcccccaacatgcagatattatcctacatgttcaacttacatgattgatgctttaaaaaagcatggggcaattttaggcttaataatgggaatatcgcgaataatacgctgtaatccttttattaagggaggagtagatccagtgccggattattttaccctgcgccgtaatccgcatccagaacgatatgaagatgaaattattgcgcaggcgtttcattcgaataaaaagtaggagaatatatatgtctagaaaattggaaagtattgatattgaagttaatgaaagaaagggcactcctatgcctacatgggaagttattattccaggtaagcgttctattggaattattgagcaagaagaagaacgctatcatgtagtatcttctaaaactaaccatagcctttactctaagactttagaaagtgccattaatgaattgctttcatactttactttgcatgaaaaataaacaaagtagggatatacaatgacaaaagttgaaaataaagcagattggtatgatcgcatcgcatggggtgttgtagttccagtctttttattggcagtcatcagtctgtatggcatttgggtagcaacagtaaatgatcctaagatgggaagccccaaaaaagccgttttaattcaagctgtatggtatttagtttcaattggattagtaatttttgtgatgcaatttgatgcagagcagctttttaaaattgcaccgatagcttatggcataggtatctttttattaattgctgtgctgtttttatataacaagcaggtgtttcaagatactggtgcaaagagttggtttaaacttggaccattaacttttcagccatccgaagtaatgaaaccggcttttattttgatgctagccagagtagtagagcgacataatgagcaatacgcccatacttttaaaactgattgtgtcttaattggaaaaatatttgcttggttaattcctgttgcggttttactaaagttgcagaatgactttggtactatgcttgtgttttttgcaattgttggtggagtgattttagtttcaggaataagttggaaaataattataccagtctatggattagtgtttattattggagcagcagctattcttttggttactacacctgggggacaggcatttttaggaagtgcgtttaattttagagcctatcaatttcaaagaattaactcttggcttaatccctctcaggatacttcatcaggtgcctatcaattatggcagagtatgaaggcaattggatccggtcaaatttggggtcatggttttggaaaggtaagtgtctatgttccagttagaacatcagatatggttttctcagtaattggtgaatcattaggatttgtcggatgctgtgctttgatcttaatttatttctatctaatttttcaaatggttaaaattacctttgaaacaagaaaagcattttattcatacatttctactggaattattatgatgatcttattccacgtttttgaaaatgttggaatgggaattgatctattgcctttaactggtatcccgcttccgtttgtttctcaagggggatctgccttgttgggtaatatgattggcattgggctcattttatcaatgaaatggcaccataaagattatatctttagtactgcaggagatttttaaataaaaaaagaccttgtcataaattgacaaggtctttttttggtaccgttagttttcttgatttttcttaatatcttcattttgtgcggccggttgacggattactagaacatcgcaagctgcagtccgagtaacgtattctgtaatactaccaattaaaagtctttcaacagcgtttaaaccagtggcacctagaataattaaatcaatattatgttcttcaggaaattcatgagcaatgatgttctttggagaaccaaattcgattgagtaatgaacatttttaacaccggcatcctttgcacggttataatattcttcgattttagtttttgcctcttcagatacttgttcaaccattgcagaatcaaagctggaaacatcttgaaaggcacgagtatctactacgtgaagaatttcaagagtagcaccatttctttttgctacttcaacagctttgctaaatgcaacgtcagcttctttagaaccatctacggcaacttggatatgttgatattgttttaacatgttgatcacctctccaccaatattttaccaaaatttgatttaaatagagtaataaaactattcatttaaattcataaaggtgaaagagaaaattgaaatagccattgcagcaatgatcaaggtgatgaaattaaatattttgggtaatgtaaacaagataataattccgacaatcccagttaaaaccaaaaccaaacttgttactgaaaataaggtgttgatttttctatttccaataaaagtaaaaatgataaattgtcccttatttttacttctaattaaataccaagctgtaataaatactaataatataaaaattagcattaagacttttaataccacttatgtaatcctcacttaataaaaaaagcggcttgcgccgcttccttgaatttcaatggaatctgagttgactgcaacgtaatgacgcttgttgaacccgcagtgttcaatatttgaatctatgtcgcagtgaatatggatcctagatcagactagtattccgattcagatgttattcataaattccaacgtctttagtttgatcggtcaactttgtaattaggttgatcaactcagatcaactatattctagcaaagatacagttaatgtcaataaattgaatttacttttgtaggccatcatgttgcatctttttaagacgaagatactgtttttttagcgcgtcttctatttttgaattacccttaggtttaaaataagatacatttttcaaattattaggtagatattgttgagcaacccaatctccttggtaatcatgtggataaatatatgaaaccccatgatttaagttttgtgctcctttataatgtgcatcttttaaactatcaggtatagaatcattttgcttattttgaatgtcacttattgcagaatcaattgcaacaattgcactattacttttaggagataagcaaagttcaataaccgcattagataaaataatacgtgcttccggtagaccaaccatttgtgcagcttgaactgcattaacgacgcggctgcatgctggaggattggcgaggccgatatcttcatatgcaattactaataaacgcctacaaattgctactaaatcacctgattcacaaagattacctaaataatagagggcagcatcagtatcagagccacgaattgatttttgaaatgcagatagtagatcataatggccatcaccacttgaatcgtaattttgggacttaaattgaatggaatcttgcatttctgctttatcaataatcagtttatctttatgagatttagattttttctcttgatcagttgataaaactgctaattctaacgcattaagagtgcatcttaagtcgccatttcctttatctattaatagattacgagcatcttttgttagttcaacattgtactttcctaagccattttcagaatcggtcagcgcacgatcgattgccttcgagatatcggtacttttaagtcgatgcaattcaaaaatctgacatctagatcgaatagcaggggagatggatatatatggattctctgttgttgctccaattaaaataatattacctgattctaaaagtggaagaagaaaatcttgcttggtcttatccagtcgatgaatttcgtctaaaagaaggataactgtgccactcatttttccttcttcagcaacaatttgaagatcttttttcgtatctgttgctgcgttaagctttctaaaagcatatttggtagaaccagcaatggcactggcaatactagtttttccaatgcctggtggaccataaaggatcattgaagataatagcttagcctcaaccattcttctaattatttttttatttcctactaaatgttcttgtccaacaacttcatctagattcttagggcgcatacgataagcaagaggtttcatttttaatccttttttctaaataatctattccagaaactttcttttttcggctcagaaagttgttcatgaggagcttctggagcataaacttgattaatctcgatccggtaatgattaatagcggtttttgaaactactaaaacaccagtagcgtttggctcatcttttgctgtatcatcatttattaaggtgaattttatatcttgctgtgaacataaacccattagttttttaataaaattgttttgaggcattttcccattgattaaaatggtataacccttgaaatcattaatgtgttttaaaaatagggtatctaatgcttggttatttgtttcttctacagtcattcgtactaaaactcgttctcgtaaagagcctaaatatcttcttcgctcatctggacgagtttgaggagtaatccccttagcagcattttctagtcgtgtatttaaatctttagtcataattttgttttcctttttctggttaaaagctttattcttagtgtagcaaagtagaagaggagaaaacaaaaaagtcttcccacaattggaaagactttttgtaatgaagcagtaaatattaaagcttcttgttgtaccattcaacgataagagcttcatcaacttctggttccatttcgtcacgttctggaagacgaactaaagtaccagtcatcttgctgtcgtcaaatgaaacaaatggtggacgtgatacaactgcatctaaagcgtccttaacttgttgcaagttctttgacttatctcttaagctgatttcttgaccaactttaacttcgtatgaaggaatgtcaacacgcttgccatctactaagatgtgaccgtggttaacaagttgtctagcttgttctctagttgaagctaaacctaaacggtaaacgatgttgtctaaacgtctttcaagtaaagccataaagttaacaccgtgcttaccttcacgaatcttgccagcacggatgaataagttttggaattgacgttcatttaaaccaaacatccaacgtaacttttgcttttcctttaattgttgaccatattcagaaaccttagcacggttgttaggaccatgatcaccaggtgcgtagttacgacggctaatttccttaccagtacctgaaagtgagatacctaagcgtcttgaacgtttccaacttggaccagtatatcttgacataaaaaaatcctccataaaaaataataattttttggagtaaaatatgagaaataagttcaacattcgtgcatctcaagttgcatatttcgcccagtgcagcgcgggttactcgttcactaaacgcctcaagatgttgacgttcttgtcacttattgctgcaaatattttacacgaagactattatagtaagaaatataatttaaagcaagtaaaagtaaggattttctagctgggatgtgattaacaagtgataatgtcttaactgttaacttaggaaaatgtcctaataagatattaactatgtcataatctcttttattggaggttatggattaaatgaagaggatttatttaactatgaaatatgaagaacagtataaagtcattaaagatcttattgatcataatgggaacaaacatagggctgctaaaaagctaggtatttctgttagacaagtaaatagaagaattaaacaatatcaagataaaggaaaagcggccttcgttcatgggaacaaagaccgcaaacctgttaattgtctcaccacagaaattaacaatcaaattgtaaccttatatcgctctaaatatcaagattgcaatctgaaacattttgttgagctactagaaaatttagaagatattcacgtctcttacactaaggtctatactctccttaaaaagcaagatattctatctcctaagccatggaaaaagactaagcgtgctttagcgaaaaaaagatggcgtacccaacaccctaagcaaacaaaagaagaagttgaagttgaagttgcagtcaatcatcagctggctgtggcagacgctcatcctcgtcatgaacgctgtaaatattttggcgaagaaattcaaatggatgcctcagtcttagtttggtttggtactcaaagagcctacctgcatctagcaattgataacgctactggcattattgttggtgcttattttgactggcaagaaaccttaaacggctattatcatgtcttcaaacaaattcttcaaaattatggtatcccactctgttttaaaacagataaccgcactgtattcaactacgaaactgctaagactaaatctgctcataaagatgtcctcacacagtttggctatgcttgcaaaactttaggcgttgatcttaaaactactagtatttcacaggctaaaggcatggttgaaagagctaatcaaactgttcaaagccgtcttaaacctgagttaagattagcaagtgtaaagacaattgaagaagcaaacaagtatctgatagaacagtttgtccctaattttaacaagaagtttggcaataaaactcgcaaagggtggtctatttttgaagttgctcctagtgaacgcaaaatcaattacacgcttgctgttcttagtggcagagtatttgatagtggctcagctatttcttttaagaataagctctatcaagctgtagatgaatacggcaagttaatttgtttcatgaaaggcaccaaatgcttggtaattgaagctctaaatggacagctattagctacagtagatgatcatgtttatttactcaaagagattcctaaaaatgcaaaaatatctccagaaatagatcaagagcctaaaaagaaaagagctggaagaaaatatattccgccaatgtcacatccgtggaaacgtgagtcatttttaaggcaacaagcaaaagctcacaaatatcatcaatatacataaaaagcggagaaaaattctccgctaataattaacaaattttaggacattatcctaagttattgacagtaaaagtaaggattttctagctgggattgagatgaagtctggtataattaatatggaagatggagggtattatgtcatcagggttatctattcttattattgtaatattaattgctataattgctgcaattgctacagttgttattcttaataaatattttaatcaccagattgcagaactagatgcgttaactgatgagttaaaagatttgagtgttgaagaagacatcaagcgtctacaaaagatggaattagccggtaaaagtttagagacttttaaaagatggcaaaaggtatatcaaaaagttgacactaaagacgttggagaattaaagcaccttcttgaacaagcggctggacttaatgcaaagtttaatctaataaaaacgcatcaattaattaaagaagcaaccgagttattgcaaactaatcaagataatgttgaacgtagtaaacaaatatttactaatttattagaagcaaatcgtgataatcaaaaacactatgctgcattatcaaaagattatcaacaattgcgtaagaagattttgtcacagtcatttaattatggaaatgcaattgatcaaattgaagaagatttagcgaccttagaaagtgattttcagactgctaagaatttgtcaggtgaaggggatcatgaagaagctaaaaaagtattgactaagattgataccaaacttacatcattgaagactgatcttcctaaagtagagaactttgaccaagaattaaagaatgtttttccagatcaactcaatgagctcagcaatacttatcgtcaaatggtaaaagataagtataagattacagagattgatgttttagaagagattaaaagcttaagggaattagttgatgataataaaaagagcctcaataaactggatcttgcgaaggttgagaagagtaataaagaagtaagtacaagaatcgatagtttgtacgatattcttactaaggaatttaaagcacgcccatttgttgacaataaccaagataaaatcgtgcaaattctctcccatatggggaatgcatctaatcaactcgtagctaaattagaacatgttgatcagagctatgaattaactcatggtgaacttgccgaagctagacaattaaaaagtcaggttagccggatgaatgctgattttgatgttgattgtcaagaaattgctgacggtgatggtgtttactcacaaattgaaaacaagtggttaacaatgcttgataatttaaagaaaattgaaaagactgaaaagagactttcgggtgatgtagacggattatttgatgcagaaaaaattgccaacgattctattattcatttcaaacaagaaatttctttagtttatcgaaaagttgaacggcgtagattacctggaaaacctgagagcttcattcaaatgtatactttagtcttaaatgaagttaagcatacagataatgaattgaatcaagttagaataaatatggaaaaaatatctagcgaattgattcaaattcaagaagatatagagcgcttaaagaaagaagccgatgagattctaaattccgctgatctagttgagctaactatgcaatattctaataagtatatttcaaatccagaaattaagcgtgctcgtaaagaagcttatgacttatatcaaaataaatatgaatataaggaagcactagacgtaattgcaactgccttagagaaggttgaacctggaagttatcaaagaattgaaaaagagtattatagcgagcaggaagaagcagaagaagaagagtaaatgattgaagcaatagactttttaagttagtattttatatgattatcaaacggccattttaatggtcgttttttagaggagaaagaaaattgatctattttgataatagtgctacaactgctgtctatcctgcagttttggaaacgtatgacaaggtaacaaaggatatttggggaaatccttcaagtctacacaaaatgggggatcgttcacatcaacttttagaagcttccagaaagcaaattgctagtttgttaaatgtaaaaccacatgaaatcttttttacttcaagtggaagtgaatcagataattgggccattaaaggaacagctttagctaagaaagaatttggtaatcatattattacttcaagtgctgagcatgctgctgttttgaactcagtccgtgcccttgaagatttaggctttcgcgtgactgttttaccagttaataagaatggtcaagttaatccagatgatttgaaagctgccttggataaagaaactattttagtctcaattatgggcgtgaataatgaaattggtacaattcagccaattaaagaaattagtaaggtattagaagattatcctaatgttacttttcacgttgataatgtccaagctttaggaaaagatatttgggatgaagtatttacagatagagttgatttaatgagtttatcagctcataaatttcatgcacctcgtggagttggtattctttataaaaaagaaggcaagatgatcaaaccgttaattgatggtggtggtcaagaaaaaggcttgcgttctagtacagaaaacttacctgcaattgcggcaacagccaaagcaatgcggctatacttatcagatgaaaagaagaatgctgaaaaagagttagcagttaaaaagaaaattatttcctatcttgatggaaagccaggaattcatattttctctccgataaatgataaatttattccaagtatcttgtgtttctctttagaaggtattcgaggagaaactttggttcatacgcttgaatctaaggacatttatgtttcgactactagtgcttgttcttcaagaagtggcgttgagagcggaactttaaatgcaatgaaggttgaagatgatctagcaactggtgcgattagattaagtttcgacccaagtaatactattgaagaagccgagcaatttatttcagtttttgataaaatatataagcacttcgctgaaattaatcatttgaaataaggtgaaaatatgcaatatacagaagtaatggttcgctatggcgagctatccactaaaggaaaaaatcgtaaagattttattggaagattagctggtaacgtaactagagctttacaagatttcccagaaattgaaatacatcctaaacatgatcgaatgcacattgttttaaatggagctccatttgataaaatcgatcagcgattaaagcttgtttttggtattcaaacttattcgccaaccataaaagttgaaaagaatcttgatgctatcaaaaaagcttcacttgaattaatgcaagcgacttttaaggatggaatgacttttaaagttaatactagacgtagtgaccatgaatttgaatatgacactaatcaattaaacactatgattggtgattacttatttgataatatggataacttaaaggtaaaaatgaagaagcctgatttagtcttgagaattgaagttcgccaagatgctatctatatttcaaatcaacttcttcatggtgcaggtgggatgccagttggtacggcaggaagagcagtgatgatgctttcaggtggaattgattcaccagtagcttcttatctcgcaatgaagcgtggagttgaaattgatatggttcacttctttagtccaccatatactacagaaaaagcgctagctaaagcaaaggaacttactggaattttagctaactattccggaaagattaattttattgcagtaccttttactgaaattcaagaacaaattaaagaaaaattgccagaaggttatttgatgaccattcagcgtcgctttatgcttcaactagcagatcgtattcgtgcaaagcgtggtggtttagcaatttttaatggagagtcagttggtcaagtagcttcacaaaccttagagtcaatggtagcgattaatgatgttacttcgacacctgtccttcgtcctgtagccacaatggataaaactgaaatcattaagctagctgaacaaattggtacttttgatctttctattgaaccatttgaagattgttgtactatttttgcgccacctcgtccaaagactaagcctaagctagatgaggctcgtaagttagaaaatagacttgatgccgagaaaatgattcaacgcgcaattgatggaatgaaaattacaccaatttatccaaatcaaaaattcttggatgataaggctcaagaagatgcagacttattgtaaaaaagtgctagcaattgctagtgctttttttgtttgagaaagatatagaaatgagaattgataagtatttagctaacatgaatgttggctcgcgtaaagaagttcacagtcttattaaaaagaaagttgtgacagttaatggagaactggtaactatcccaaaacaacaagttaaagaaactgatttggtagcagttgatggaaataaaattgcatatcaacagtatcattattttttattaaataagcctaagggtgtaatttcagcaactgaagatagaagtcagcagacagttatttcattgcttaaaactaaagatcgttatcaaggtattgccccagtaggtagattagataaagatactacaggcttgttgcttttaacaaatgatggagctttagcacacgaactgcttgctccaaataaacatgttgcaaaagtatatcgagcaaaaattgctggtgttccagatccagaaactgctaagaaatttgctcaagggctgattttaggtgacggaactaagttgaagccggcgaaattaaagattttaaaacaggatcaagataataatctgtcgcaaatcgagattcaaattcaagaaggaaaatatcatcaaattaagcgaatgtttggagcagttggcatgaaagtcttggaactagatcgggtttcaatgggtaaattgcatttacctgctgatttaaagcgtggagaatataaagagattgatctagctgaaattaagtaagaaaatttaaatatgaaaaaaatcatttttgtaattttctttattttagttttcccttttacctgtggatttttgaatattgcacatcgcggagacaatgaacaggggaagtttgctgaacatagttggattgcttatgatcgagcactttgcgcacaagttgattatttagaacttgatttacaaaagacaacagacaatgttttagtagtaagtcatgatgataatttaagtagagtttttggtattgataaaactattgccaatcattcgtatcaagaattgctttcatataaaaaccaaaatggtgaatctcttcatagtcttgaggatgtatttaaacgttatcaaaattcaaatgtgaaatttatgattgaacctaaagacgatagtgaagaagacattaagctattacttaatttaatcagacaatatcatttagaaaatcgcgttttattagagtcattttctaaaagcgctttgatgaaaatctctaaaattaatcctcaaattccaacgacgcaactagctggtgaagttaatttaccaccttcaacgcaatattatgctaataatttttattcaacaaaagtggctaactacttaagtgagcataataaaagatatttactctggggcgttaataaaaaaacgcaaatgaagcagtatttgcagccgggtgaaaatgtgtcagggttattaactgactacccagttgaattagcaaagctcctgcataaaagtgatatttttaaaagaaattatgaagctatttcttttcctagtaaattaatttctggtctgatgtacttgaaaaatggaagttcagttaatgttgatcaagttaaaattaaaaataatcaacttttttatcatgttaagcctaatatttggcttagtgatcatgatttaaagaattctgatcactttgcacctaaagcacagaccggaaaaattaaacttcgaaaagaagcaatggtttatacagatcctttttttaaaaaatatgctggaaagaagctgccaaaagaaagcacgtggaattattttgcagtgaaaaaagttgacgggaaaactgcttataatttgggtggttcgcaatgggtaaaacaataaagttttaattgctagtttattcaaaacatgataaaattataagcaatatatagggagtaaccggcataaggtgtatttatggcgtcaaaacgaaattaatttttccgctgtaagtttaaatggtgagactattgactaaacattttttgttcagacaatggtctctttttttatgccaaagtctggttttcctattagatggagggtttaagtgaaagcatactatcgtgaaagcaaagaagagcttatcaaagaattaggagctaatgaagagcaggggctaactaataaagctgctcaagaaaaattaacgcaagtaggaccaaacgctttagtagaaggcaagaaaaaaagtgttttagaagtctttctagagcaatttaaagacttaatggtcattattttgattgttgccgctgtgatttctgcatttactggcaatttagaaagtacagcagttattattgtcgttttaattttgaacgcaattttaggaacggtacaacatgttaaagctgaaaaatcattagaagctttaaaatctttgtcagcacctgtggcaaaagttttaagggatggtaaaaaaaaagaaattgccgcaaaagatgttgttcctggcgatattcttttacttgaggcaggagatctagttactgctgatggtaggattttagataacttttcattacaagtaaatgaaagttccctaactggtgaatcaactaatattgataagttagatacaacatttgataaagaagttcctttgggtgatcgagtaaacatggtttactctagttcgcttgtaacgtatggacgcgcaaatattttggttacagcaactggaatggatactgaaattggtaagattgccaccttgatgaacgaaactaaggagcgtagaacgcctcttcaagtttcacttgatcaattttcatcgcgcttggcaactgcaattttaattttctgtgccttaatcttaggacttcaaatgtggcgtggtcagcctttactagatgcgttattatttgcagtagcactagctgttgcagctattccagaagctttgagttcaattgttacaattgttcaagctatgggaactcaaaaaatggctaaggaacatgctattatcaaaaatttagcagcagttgaatcactaggttcagtttcagtaatctgttctgataaaaccggtactttaactcaaaataaaatgactgttgaagatatttatattggcggcgaagttcttaagccagaagaacttaatctaagtaatcaattgcaccgctatttactatacgatgtagttttgaataatgatgctagtttgtcagatggaaagaagattggtgacccaacagaatcagctttgcttgaaatgtatcgcaaagttccaggcattaatcttgggaatggaaagttaggtttatcggaaagtgaattaagaaatcacttggatcgcttagaggaagtaccatttgactctgaccgtaagttaatgagtactaagcatctaattcatactattccaacaatttttgttaaaggagcaatcgatgtcttgcttaagcgctgcattaatattcgttttggggatgaagtgcggccactaactgagcaagaccgaaaaaatattttggctcaaaataatcatttttcagagaatgggttaagagtattggcttttgcttataaggaaagcgatgaagaattatctactgatactgaaaaagacttgactttcattggtttagtttcagaaatggatccaccgcgagaagaaagcgtcgcagccgttgctcgcgcaaaagaggccggtattagaacagtgatgattacgggtgatcataaggttactgcagtagcaattgctaaaaagattggtatctttacagatggagacttggcattaactggcttagaattagatgccctaagcgatgaagaattagatcaacaaatcgaaaaagttgcagtatatgctcgtgtttctccagaaaataagatcagaattgttaatgcctggcaaagaaagaaccacattgtatcaatgactggtgatggtgttaatgacgcaccggctcttaaaaaagctgacgttggagttgccatgggaattactggtactgaggtatctaaagatgccgcaagtatgatcttaactgacgataactttgctacaattatcaaggctgtcgctaatggtagaactgtttatgaaaatatcaaaaatgcaattggctacttactatcaggtaacttatcggcaattattacagttctttttgcctcaattgcaggattgccagtaccatttgttgcagtacaacttttattcatcaacttagtgactgactctcttccagctttagcgattggaatggagccaggaaatccggatattttaaaacgtaaaccacgtgatcctaaagctagcttgttagacaaaccatttgttactcaaataagtacgcaaggcttcttaatttcattgagtgtcattgcagccttcttaattggtttgaaagatagtcctgcaattgcatgtacaatggcattctcaaccctaacctttgcccgtttacttcatggctttaattgccgctcacaacatagcatttttaaaattggatttaaaaacaattggtacagtttagcagcctttgcattgggcactgcacttttagccttaattctctttgtaccagcactgcatggcttatttgctgttcaaccattaagtggacaagaagtttggctaatcgtgattttagcaattattccgacagttttaattcagttggtaaaagtaatcagagaaaatagaggttaattctcgccttttctcttgttttctttcatgctataatcataaacaaagcaggaatcaagaggagtaaattcgcattacagagaaaagtcagtatgctgagagacttcagaattttacgagtagcttgattagctgattaattgaactttagtaggttaatccggacacttcagcaccgttatcgcttataagagaggtatacaattgtatacttaacgtaggtggtaccgcggaaaatttcgtcctagacaatataagttgtctaggacttttttattggaggaattttaatgacagatttagcacctaaatataatcctaatgaggttgaaaaaggtagatatcaagaatggcttgatgaggatctttttaagccatctggcgataaaaaggctcacccttattcaattgttattccaccaccaaatgtaactggaaaattacacttaggacacgcttgggataccgcaattcaagatacattaattcgttttaagcgaatggaagggtatgatactctttaccttccaggtatggatcatgctggtattgctactcaagctaaagtggaagcaaagttgcgtaaacaaggtaaagaccgtcaccaaatgggacgtgaagcgtttgttaagcaagtttgggactggaaagatgaatatgcaaacatcatcaaaggtcaatgggctaagatgggattatctcttgattactcaagagaacgatttactttagataaaggactttcaaaagccgttagaaaagttttcgttcaattatataacgaaggactaatttatcgcggtgaatatattattaactgggatccagaattacaaactgctcttagtgatattgaagttattcacaaagatgacaagggtgcattttaccatataaaatatccatttgtagatggatctggttttgttgaaattgcaactactcgtcctgaaactatgtttggtgatacggctgtggctgttgcaccaggggatgaacgttataaagatatcgtaggtaaagaattagttctaccacttgttggtcgtcatattccaattattgaagaccaacacgtagatccagaatttggtactggtttagttaagattacgccagctcatgatcctaacgacttccaagtaggtaaccgtcataatcttgaaagaattaatgtaatgaatgatgacggaactatgaacgaagaggctggtaagtatgctggtatggatcgttttgaagctcgtgaagctttagtaaaggacttaaagaaagaaggttacttaattaaagttgaaccaattgtccactcagttggtcactcggagcgttcaggcgttcaagtagaacctagactttcaaagcaatggttcgtaaaaatgaagccacttgctgaagaagttcttaagaatcaaaagactgatggtaaagttaactttgtcccagagcgatttgaaggcactttgaatcactggatggaagatgttcatgactgggtgatttctcgtcaattatggtggggtcaccgaattccagcttggtacaacaagaagactggtgaaacttatgttggcgaagaagcacctaaggatattgaaaattgggaacaagatccagatgttttagatacttggttctcaagcgctctttggccattttcaacattgggctggccagatactgataatccagattttaagcgctacttcccaactaatactttagttaccggatatgacattattttcttctgggtatcaagaatgatcttccaaggtcttcactttactaagaagcgtccatttaaagatgttgttttgcatggtttaatgcgagacgaacaaggacgtaagatgagtaagtcactcggtaatggtgtcgatccaatggatgttgtagataagtatggtgccgatgctctacgctggttcttattaaacggtactgctcctggtcaagatacgcgttatgatccaaagaagttagctgctgcttggaactttatcaataagatttggaatgcaagccgttttgtaattatgaacttgccagaagatgcaaaacctgctcatatgccagacactacgaagtttgatttagcagatagttggatttttgatagattaaatcatactgtatcagaagtcacccgtttatttgatgaatacaagtttggagaagctgggcgtgaactttataactttatttggaatgacttctgtgactggtacattgaaatttctaaagttgctttaaatggcgatgacgaagaattaaaagctagaaagcaagaaaacttgatttggattcttgatcaaatcttacgtttaatgcacccaattatgccatttgttactgaaaagttatggctttcaatgcctcatgaaggcaagtcaattatgactgctaaatatccagaaactcatgcagagtttgaaaacaagcaagcagacagcgatatggcattcttgattgaagttatcaaggctgtacgtaatattcgtatggaagttaatgctccaatgtcttcacaaattgacatcatgattcaattggatgatgaagcaaataaacatattttggatgataacgctgaatatgtagaaaactttttacaccctaaagatttacaagttgcggcagatattgaagcaccaaaacttgcaaaaactgccgtaattccaggagctcagatttttgtaccgttaactgaattagttaatgttgacgatgaacttaagaagatggaaaaagaagaaaaacgtcttgaagaggaagtacaaagagctgaaaagaaactcgcaaatcaaggctttgtagctcatgctcctgaagcagttgtaaataaagaaaaggaaaagaaagctgactatgaaagtcaacttgctggtgttcgtgaacgtatgaaagaattaaaggaaagtaaatagaagtgaaatttactaatgttgaccaagtaattaacagaatatattctttgcctaagctgcaccctaaaaatgatttgagctatatcaagagaattttgaaccaattaaataatcctcaagatagcgttaagacaattcatgttaccgggacaaatggtaaagggtcgacatcctattatttgagtaatctattacaaaaggccggtcaaaagactggcctttttgtgtcaccttatatttatgaatttaatgaaagaattcaattaaatagtaagaatataagtaatagagatttagtcgaagttgctaataaaattgaagcagcaatagaagagttgaaaaaagttgatcctaatttttctttagtaacatttgaatatgaagtagctcttgcttttcagttctttgctcaagaaaaatgtaattatgcagtaattgaggttggaattgggggcgagcatgataagactaatgtgattacaccagaagtaagtatcattacaactattggcttagatcatgaaaaaataattggaccaactttagccgatattgctaaggagaaaagtggcataatcaaaccaaataaaccagttgtgctaggtaatattcctcaagatgttttaagtattttactcaataaagctcaagcagaaaattcaaagtcatttttgttgggaagagattttaaaattaaggtgtctaaaactgcaattgaatatcaagattcagaaaaaagatatcagttttttaagcgtcctttagtagaagcatatgatattggagtggcagttcaagcagttcagcttttgaatttacaattaaataaacaaaagattgaaagggccattaataagacacaaattcctggtagatacgatattgttcagactgtgcctaaaattattgttgatggggcacataatttgcaggcgatgacaaatcttttgcatttgattcgaaaagagaaccaaggtcagatatatatacttcttggaatgatgaaagacaaggatttagggctagtcacaaatttattcaaagatgaaaaggttactttaactcggatagattatcctcgagctgcgagattagaagattttcctgcagaagcgcagaaaaaatataattatgaagaaaatttcaaaatagcttatactaacttgaagaataaattgaagccacatgatattctattagtgacgggatctttttatttggttggtgcagttttaaattactgcaaaagaggtaaaaaatgaaagttgaaaatattgctgaaccaattgaaggcatcatttttgatatggacgggttattagttaattctgaaaagttatattgggatgcaaatattgttgctgctaaagaagcaaatttagatattccagatgatagttacttgaagctcgttggttcatcggttaaagaaatggaagaattttatcatcaacattttaagacagaagcagatcgtgataagtttattaaaagaactgatgaactagtttgggagtggactgatcaaggaaaactgaagcttcaagcgggtgtaagagatgcgttagtaaagtttaaagaaaaaaagatcaaactggcaattgcatcaagtaattatgatgaagtagtggctcataatctagaagttctaaagataaaggattattttgatttttatctaagctataaagatgttgaagcaggaaaaattaaggctaagcctgcaccagatatctatttattggcagctaaaaagatgcaacttccaaaagataatttgttagtatttgaagattctagcacaggtgttgcgtctgcaagtgctgcaggcttaaaatgcgtaatggtaccagatttaaagcaaccaacaactttagataaaaggaatgcaacattaatttgcaaagatttttacacttttcttaaaaaaatcaagtagttttttcgtaataaatatcaaaggagtaattgatatttatgaaaaaagaagaactattgcaaactgatgttgatctagtaaaaaagttggctagatctttgaaagaaaaagatattattactttttatagtttatttaaaaagctagaagaagtagggataaatagctttaaggaattgtggcagtatgcggctagtccaaaatgcgaagatgaaatagcagttgtactgcagctcatgttagagcgcgtaaagggcgttaataataaagaaattgagagcctctactctagttcgcaggtaggatgttatatagctgacaagttatgtggccgtccgcaagaagaattatatggaatttatcttgattcaaagaataaaattattgctgaaaagttaatttttcaaggaacagtaaatagggcagttgctcatccacgagatatttttcgctgggcagtaatttataacagtacggccttttttgtggctcataatcatccaagtggggatgaacaaccatctcagcatgatttacgatttactaagaaattagtagaagcaagtaaatgtatgggaattgattttctagatcattttattgtgactgataatacttatttaagctttcgagagatggaacttctttaagtcttccttaagtatgagcaaattttcttaaagcaaatttttacattagattttctatgctataatatctaagactaaataaagatacgatttagtctaaaataattaaagagataaatttaaggagagattttgcgtgtttggattaggatctaaaaatattgggattgatttgggaactgccaacacactcgtttatattgaaggtaagggtattgttttgcgcgagccttctgttgttgctaaaaatactcaaacgggtgaagttattgctgttggttcagaagccaaagaaatgattggtagaactcccggctcaattgttgctattcgtccgatgaaagatggagtaattgctgactacgatacaactgctgcaatgctcaaatatttcatggaaaagactgtgggtaattcaaagcctgctgctatgatctgtgtgccttcaggtgtaacagaagttgaaaagagagcagttattgacgcggctagagttgcaggtgcacgtgaagcatacgtgattgaagaaccgtttgcagcagctattggtgctggtcttcctgttatggatccaaccggctcaatggtagttgatattggtggtggaactactgatgttgcaactatttcattaggtggtattgtatcctcccgttctactagaatggcaggagataagttcaatagtgcaattgcaacttacattcaccaaaactacaatttattaattggtgaacgaactgctgaaacaattaagattcagattgcttctgcttcagttgaaaaggcaaaagaaattgaatcaatgaacattcgtggtcgtgaccttgtaacaggattgccaaaatcaattgatattgatgcagaagatgttgcaaaggcaattcaagaagtagttcaaaatattattgtagcgattaaagagactttggaagaaacatctccagaaatcgctgcggacgttattgaccatggtattgtgttaacaggtggtggagctcttttgaagaacttaccagaggttatttcagacgctactaaagttccagtctttattgctcaagatccacttgattgtgttgcaattggtaccggtgaatctctcaaaaatattgaagttatgcgtaagagacggtctttttctattaacttttaaattaggaagatagtagtagatgaaaaaatttctcaaaaacaaaaagttattgacaattttcgtactagttattttagttttaagtatgttatctatttccgtccgcttacgtaataagagagaaacgccattcttagttcaaaaaattggtaatgatacagtttcaattgttacaagagtagtgaattggccaattaatttggtttctaatggagtggctaatgtcgaagatttattcaatactcaagctgaaaatgatcatttaaaaaaacaaatcgataaccttgctcaaactaaggcacggaacagctctttagaagcagaaaatacgcaattaaaacaagctctagaattaaagaagactttaaccgactatactatcatcaatggttcggtaatttctcgtgctgcggatacttggtcagatttattagttattgatcaaggttcaagagctggagtcaagaaaaatatgccagtaatgtctggtaaaggcgtaatcggaagagtggttgaagtaaatagtacaacttctaaagttgaattaattactacaactgataaatctacaaataagtttgctgtagaagcagatgcagccaatggtaaaaaggtgcatggtgtgatttctgttgaaggtaacaatcaattagcttttactcaagtggttgatggacagaaattaaagaaaggcactcgagtttatactagtggaatgggtggtttatcaccgaaaggtcttttaatcggaacagttacaaagacaacacgagatacttttggtttatcagatgttgttgaaattcaaccagctggtaatcttaatgatccatcagttgtatctgtaattaagagaaaggttgaagagtaatggcagaattacgtcgatggtatgttgccattgccttatttatggcgctaattttggatggagtgctagcctataatttgcagacttttatctttcatcggggcttctctggcagctgctggctgacagttgttggtattacgctaatagccctatgcgatgataaaaatgacgccaatatctggctttgcttgggcttaggatttattgcggacctttactatttaggagtcattggtatctatactgtagcatttcctttaatttgttttcttattcaacagagtgctcgctttcttccagaagtattttggtttcgcttattaatttgtttagttgtttatctctgtgtgagcttttatgtttatctaacattaaatatggtagggatgattcaattatcttttgcaagttttttaaatagtattttacctaatttgctatggtgttttatcttagttttgtgtacttattggttttgggtaaaacttgctgaagagtatccatttttgaaaaaagaatattatttttaaacaaaaaggagtcgcaattttgcgactccttttttgcataaaataattaaaattgaaagacaccagttccgattaaggcagtagctactacaccaagaagggtaatcactgccatgaaccaggccataacaatagttaatttttgaaatccagattttttcttacgttttctcatagctgcctcctaaattaataattctagtttaccatgattttaattataattttatatttaattgaaatagtttaaaataaacttattggaggtctttcatgaattttttgcttatctttttagtccctttatgtggaattgttgttgcagcttttctgatgaagctttttcctaaagctcaatttagtggttatgatattttgccattttttttcatagtagcttgtcagctcttaacgcaagaaactaagcaaccgtcatttttaccttatggctttttattgtattttattttggtagtaattgtttctgtttataccgctatcaagaataaaaatatctctgttgctaaaactttaggtacgttgtggcactatctggctgcttcatccattgtttggtatgtaggactcataattttgctgttattataacgtttttccccactttctttattaaagtttaaagtgctcttatccttgtgataagggcattttgttttggataaaattataattatcataaaataacagaatatctaaataaaaagtgcaaaacttgtggtagaaagtggggaagtgtggtaaattattcattggaaaggggggctagaccatgttcatgggcgagtatcatcataatctcgacagtaaagggcggctcattataccggccaaatttagagacgagattggcgagaagatggtatttactcgtggaatggagggctgtatttttggctatcccattgaagaatggcaaaaaattgaggctaagttagccaaacttccactgactaagagaagtgcacgtaaatttacgcgtcttttctactcaggtgcgatggagagtgagttcgacaagcaaggacgtgttaatctgaccatgacgctgaaagagcatgccgcactcattaaggaatgtgtgatcgttggtgtttctaatcgaattgaaatttggtcagcagaacgctggaatgatttctcggaagaggccaatgagaactatgacgatatcgcagaagacttggatgacatcgagttataaaaattatgaaattcaagcataaaagtgtgcttttgcatgaaacaatagacaatttaaatccaaaagatgatggtctttatgttgacgcaacttttggtggtggcggtcatgcccgatatctactcagtaagttgaatagaggaacagttattggatttgatcaagatgaatatgcaatttcgatggcaaaagaaagttttgctgaggaattgaagccaggagctgaaccaaagctaatactggttcatgataacttctgtcatttgaaagaaaatctggtagagctgggaatttcagatgggatagatggtatttattacgatcttggagtttcgtctccgcagtttgatcaacctgaacgtggtttctcttatcgatttgacgctcgattagatatgaggatggatcaaagccaagagttagatgcctatacaattgtaaatacttggtcacaaaaagaactaagtgacattttgtataagtacggagatgaaaagttttctcgtcagattgctagaaagatagtagatcgaagaagagaaaaaccgattgtaactacatttgatttggtagatgtaattaaggatgcaattccagcatatgcaagacgaagtggagggcatcctgctaagaagagctttcaagcaattcgagttgcagttaacaatgaattaggtgtattacaagaatctcttgaggaagcaattaagctattgaaaccgggtggtcgaattagcgtaattacttttcagtctcatgaagataagatcgtcaagaagatctttaaaaagtattctgaagtcgagataccacgcggaatgccgatgatcccggctgacagtaaaccaacattgcgattaattagtcgcaaacctatcatggcaagtagtgatgaattagaagaaaataaccgctcacacagtgccaagttaagggttgcagagaaattatagtttttttagttaatatttaaggagaagaagatggctgatagctcagcaagaaatttaaattatcaacaaagtcaacagcagactgagcagccaaagaaagcaattgttcttaatcccaaaagcgttccttggacagcatttgaaaaaagtttagtcgttttaggttcacttattacattaggattaatgattttattggtttcagccagcatttctgctactagtgctcaacaccagctagcaaatgttgagcagacgataatttctcaaaaaagtcataacactgatcttcgtcaggagattggtgaattaacgtcaactactagaattaataaaattgcccgtgatcaaggcttgcacttggtcgagagtaacattaggaatgtccgttaatgaaaaagtttaataacttaaatagaaatagatccaaagcccacggctaccgctttacggtggggagaatcctccagctagtcttggctttggtttttcttgtatttataggtagatttttatatataggtatttcgaatcaggttgctggtgagaatttaaataaacgagtaaatcaaatttaccgtcgaaatgaagttctaaaagcaacgagaggaacaatttatgataaaaatggtttaactcttgccgaagatgctcatgtttttaccatatatgcaattttagacaagagttcgattgattatcataataagccgatgtatgtgactaataagcataagacagcacaaaaattggctgaggtgcttccgttaagtgaagaaaagatatattcatatttgactcctaagcataaggcttttcaggtagaatttggttccgcaggtactggcttaactttgtctcaaaagaaaaagattgaggcaatgaagctaccaggaattaaatttatcgaaacaccatctaggctttatccaaatggcaattttgcttctcatattattggtttagctcaacctcaaaaaagtcaaggaacaagtaatttagttggtactatgggaattgaagcctattttgataaacagctagctggtaaagatggttatcgcgaagcatttgtcgacgcggaaaattatcaattgcctaatggtcaaaaggcaactcgcgcaacccaagatggcgataatatttacttaacactggattcaagactccaaagttatttggaagttctaatgtctcaagtacaagataaatataagccgaaggccttaacagcagttgtagaagatatccaaactggtaaaattttagctgcttctcagcgtcctacttttaaccctcagaccaaacaaggcttagatacttcttggcgtaatatactagttcaagattcctatgaaccaggttcagtttttaaggttttaacttattcgagtgcaattgagagtggaaattacaaccctaatgagcaatataagtctggcgcagttactgttcaaggatcaacaattcatgactggaataatagtggttggggcagtattccatttagccaagcctttccaagatcaagtaatgttggttttgtaaagcttgagcaaaaaatgggagctaagacatggaaagagtatctaaataaatacagaattggtaaaaaaacgggggtaacccttcctggtgaaacagctggaattttaaacttttctacccccttaaaccaagcagttacagcgtttggtcagggtgttaacgttaatgcgatgcaaatgatgcaagcatatagtgctctagcaaataatggacaaatggtgaagccacaatttgttgagaaaatagtttctccttcaggaaaagtagtagaaaaattccatcgcacaaaagttggaactccaatttattctgctaaaacagccaaaactgtattaaaggggatgcaggatgtcgtgaatgcttcttatggtacaggggctgcttataagatgccaggaaagagtatcgccgtgaaaaccggtacggctcaaattgctggaccacatggaggatatttaacaggtgataataattatattttctctgtagttggagtaacgcctgctaataatccacgctattgtgtttatctaacaatgaagcaacctcaaaaaatgtctaagccagcagaaacaattctttcttctatcttcaagccgattatgaatcgattgatttctctttctgattcgacggcaaagattaatgaaaaagtaaccgttccagctttaactggtaaaagtgttgaaaaggcaaaagaggaggctaacaacgctggtgtttcaattgaaattattggaactggtaaaacagttagtcgtcaatcagttagtgcaggggtaaaacaaggtactgatgataagattttcttatttaccggtggccaggttacttgcccgaacatggtcggctggacagaatctgaggttaatagctttatgacaacaactgatattcctattacaattaatggaaaaggaaaagttacaaaacaatctattccatctggaaaagtgattgataaaaatagtaagttatcagtaaacttgaaataatgaaaaagttaaaggagtaatacaaaatgcagttttctttgataccgttcattagcagttttgctcttacggtcatcttcttaccgttgtttatcggctttatgcgaatgaagcatgaagggcaagtgattagagatgaagggccaaaatggcatgagaaaaaatccggtactccaactatgggtggagttgtcttcatgcttgccagtgttatttctaccttatgggtattaatttggcagaaaaatttaaataagactacttggattttaatcattgcttttttaggctatggaattattggtttcttagatgatggaattaagttatatttcaaacgtaatttaggattaaaagcttggcagaaattgttaggtcaaattatcattgctgctttaattattgcactagcatttagtgatcattttgcctttgaattatatattccatttgcaggaatggtaagaaattctttcttatttagtttattcgtacttttttggttagttggattttcaaatgcagttaacctatctgacggcttagatggtttagcaactggtttatctatcattgcttatgcgacttatgcctggattgcttaccaagaaaaaaattgggtaattgttgcatttacgctcagtgtaattggtggtttggttggcttctttatttttaaccataaaccagctaaaattttcatgggggatgcaggttccttagctcttggtggaggattagcaactgtatcaattttccttcatcgaccatggtcattacttttaatcggaattgtatttgtattagaaactttaagtgttattttgcaagtcatttccttccagactactggaaaaagaattttcaagatgacaccaatccaccatcattttgaaatgcttggttggtctgaatggaaagttgatattgtattttggattgttggtttaattggaagcattatttatttaattatctggggttaattttaaaatgaaaaaaataaaaacatatgaaaataaaaatattttaattttgggtttaggaaagagtggcttttcagtagctaaacttcttttaaagttaggcgctaaacttacattaaatgataaaaaagacttatctaatgatgaccgcgcagctgaattagataaattaggtgttcgaattatttcaggatatcatccagtagagatttttgataaggaaaaatttgactatcttgttaaaaaccccggtattccttatgaaaatccaatggttgaaaaggcgctaaagctaaacattccagttattactgaaccagagattgcacttaatgtaagtgaagctccatatgtttgtgttactggttcaaatggtaagacaactactgtcatgctaacgcaaagaattatggatcatcatttatctaaaaatggtggtcatgcttatgcagttggtaatattggtgtgccaatttcagaagtcgttgaaaaagctacagataaagatttacttgtagtagaaatgtctagcttccaattgcttggcgtaacagatattaagcctaaggtagcggcaattgtagatatctataataatgttcacttagattaccataagacctttgataattacgttgaagctaaactaagaattactcaatcacaagatcaaaatgattattttattgctaactttgatcaaaagaatattttagacagagaattaaagaaaactaaagctaaggttcaaacattttctgaaacagataagacagcagattattttattggtgatgaatatcttgaaagtaaagatgatcatcaaattatgaagatcagcgatattaagatcccaggtattcataaccaacaaaattgcttagtagcaattgctatttctaaattaatgggcgcagacgatagcgatattcaatacgcattaagtacttttactggtgctacacaccgtctgcaatatgtgatgacttacaatgatcgcaagatttataatgattcaaaatcaaccaatattgaagcagctacagtagctattccttcttttaaagagccagaagttttaattgctggtggactagatcgcggttttatgtttgattctcttgttccgctatttaaaaagtatgtaaaatcaattgtactttatggtgaaactaaatatcttttagctgatgccgctcgtaaagctggtattaaagatattgttattgttaatactttacaagaagctgttccacgtgcatatgaactgagtgaagcaggagatgttattttgttctcaccagcatgtgcttcttgggatcaatttaatacttttgaagaacgtggagacttttttgtaaaatttattaaggaattaaagactaagtaaaatgagagtaattttttctggtggcggaactggtggccacatttatccaattattgcgttaatcgagcgtttgaaagaacgtaaattagttacaaatgatgagatcttatttgttggaactgatcgcggattagagtctaagatcgttcctgcagctggcgttcctttcaggacattaaaaatcaaaggatttgatcgtaaacatcctctaaagaactttgagacgattgagcttttcattaaagctactaaagaagctaagcaaattattaaagacttcaaacctgacgtagtagtcggaactggtgggtacgtttcaggtgcaattgtttatgaagcagctaaaatgcatataccaacaattattcatgaatccaattcagttgtgggcttagctaataaatttttagcacattatgtcgataaaatttgttacacatttgatgatgcggcaaagcagttttcagaaaagaaaaagcttgttaaaactggaaatccacgttctcaacaagttcttggattaaacaaggacaatgttgatcttgctaaaaagtggggcttaaatccaaatatgccaacagtcctaatttttggtggttctcgaggtgctttggcaattaatcaaatcgtggaaaaatctcttccagagcttgaaacaaaaccatatcaagtcatttgggctactggtcaactatattatggagacgtcaaaaagaaattagctggcaaagaaattagctcaaatgtgaagattgtaccatatattgataatatgccaggtttattaccacaaatgacttgtgttgtagcaagatcaggtgcaactagcttggcagaatttactgcacttggtgttccagtaattttgattcctagtcctaatgtaactcataatcatcaaatgaagaatgcgatggacatggaaaaagcgggagctgctttagttattgcagaagatgatttaaatccaaataattttgtatcgtcaattgatcatattttgctggatacaaattatgctaagcagatgagtgaagcatctaggagattaggtgtaccagatgcatctgatcaggtaatttcagtaatggaaggtttaatcaaaaacaaataatgaaaggaagtgaggtatgtggccaaaaagaaagataaaataaccaaaaaagatcctaaaaaagaattgtcaggatggattgattataaaaatagagttaataataatgaaaaaaaacgggtctctgcctcactaactaaattgcaggctgaacggcgacatgctttgttaacacgcttgggatttataattcttttttcattatgttgtatcttagccttgggttattatgtatctcccaaagctaatgtagcaagtgttcaggttaaaggtgcacccgagttaaatagtaagcaggtagtaaaaactgtaaatatttctcctgaaaataaaattgtattttgtttactaaaagggaaagaatataacaagcaattgtcagatgcttttcctgaaattgaaaaagtacaggtgggtgtaaagaatactaatcatttaatcctaactcttaaagaacgaccagttattggttatatccatgaaggtacaggttatcgaaaaattttagctacaggaaaagtgggtagccaagtaattgataaaaataagattgataaaaataagcctttgttcattggatataatcagaaagtttcactgagcgaagatattaaggtttatgccagtctcccacaacatattcgcgatcaagtaaagatgctgagtggtgaaacgcgcagaccgacacagatcgttttagtaatgaaagataataatatagttattggaaatctttcaacaattaaaagcaagatacagtactatgacaaaatcaagagtcagcttaaagaaccatcagtaattgactttgaaatcggtgcttatagtaggccgttaacacaagcggaaaaagtcaaattagggctaacttgagattagtgagaatgtaagtcatatgttaaaatttattgtatagttatgttttgggggcattacattggataaaactgatttacttgtaggcttggatataggaacaacaagcgtaaaagcagttgtcgcagacactgcatcaaatgaaatgcaaattattggtgccgcaaatggacctactaaaggaatgcggcatggaaaaatagttgatattgatcaaactgctgaaagtatcagtgctgttttaaagaaagtagcgcaaaagacaaattctaaaatttatcgtgtagtaactggaataccggtaggtctactacaattagagaatgcagtcggattaattaatatagaagaaaacggcagagaagttacagataatgatgtaaaatgcgttttagtaactgcgatcgatactgctttaaaagatggtagagaagcaattgcctttttacctaataaatttttaattgatggaaagactgatgtggacgatccaagaaaaatgatcgcgcattctctcgaagttcatggcatattattaactgcacctagtgcagacctgcacaatattcgcaaagccattgaaagagctgggtatcaaaacaatttctttgtccctacaccattagcaattgcaagtgtggctcttgatgaaggcgagagaacatttggaacaattattcttgatttaggcggaggttcaacgacagccactgtaattcacgaaaacaagattaaatatgcgacaattgatttagaaggtggaattgatatcactaatgatatttcggttgttttgaatacatccaaaaaagaagctgaaaagatcaaattacaatttggctatgctgatccaagtctaacttctagcgacaatcaatttcctgtcaatgtggtaggtgaaaactctcctaaaatgattgatgaggagtatttgagtgaaataattaatgcccgtcttgatcaaacctttagtcgaattggaaaaggactaaaatctcatgacgcatttaatttgccgggtggtgttgtgattacgggcggaagtagtgcgctccaaggcattgacgacattgtaaaagatgattttggtgttaaagctcgaattttccaacctgatcaaatgggattacggaatccaatgtatgcagcaggctatggagtagtaaattatgcttatagcctggcagatattgactatttggttaacagtgttatttatggaaatcaggttgctacgcctgtttctaaccaatcttcgtctccagaaaatatgaaatttttcaaaagacgtctaactcctagtgaaatggagcagaaagaagattataataagactagtgctacatcaacggtctctgcgtctgaagagaatgatgataataagaataataaaaaaggaatcaaagaattctttaagaaattttttgattaataataaggtggtttagtaaatggattttactttcgattctgatgacaacaaaaacgcagtcattaaagtaatcggtgtcggtggtgccggtggtaatgccgttaaccgaatgattgatgagggagtacaaggtgtttcttttattgctgcaaatactgatgtacaagctcttaatagcaataaagcagaaaacaagattcaacttggacctaaacttactcgtggtttaggtgcgggctctcatccagaggttggtcaaaaggctgccgaagagagtcaacagacaattgaagactcacttaagggtgctgatatgatctttattaccgctggtatgggtggtggtactggtactggtgctgctccagtaattgctaagattgcacgtgaaactggtgctttaactgttggagtagttactcgtccattcactttcgaaggaccaaagcgttcaaaaaatgcggcggaaggaattgctaaattaaagcaatatgtcgatactttagttatcatttctaataatcgtttattagaaatggtcgataagaagacgcctatgatggatgcctttaaagaagctgataatgttcttcgtcaaggtgttcaaggtatctctgatttgattacttcaactgactatgtgaaccttgactttgctgacgttaagactgttatggaaaatcaaggtgcagccttaatgggaattgggcgtgctagtggtgaaaatagaactgttgaagctacaaagctcgctatttcttctccactattggaagtttcaattgatggcgctaagcaagtattgcttaacattactggtggaccagatttaactttgtttgaagcccaagatgcttctgatattgtttcaaaagctgctggtgatggagtaaacattatttttggtacatcaattaatgcaaacttgggtgatgaagttgtagttacagtaattgctactggaattgactcaaaagcagaagaagaggcttcaaagcaaccgatgcgtcgcccttcacgtccaacccgtcaagaagtggtaaatccagaacctgtaaaaaaggaagaaactgaaacaacaccttcaccgatggaagcttcagaagttaaagttgaaaacacagtttcaaaagaaacttccactcctgttactcctgaagtaaatgcagaaaagaaagaatctcaagatactttacttgaccccacaagcgtttggaagcaagatagaaaagagaataagcgtccacaacctgtagaaaatgaagaaaaagatgacgatgagttcgattcatttagttcagacgattcaaatatttctcaaattgaaactagtgcagatgatgaatcagacaatgatattccattcttcaagcatcgtcgtcaggattaatatttggaggaaaaattatggcttttgataaattaggcagattttttggcattgctgaagatgatgaaatgaatgaagcaccatatactgaagcagaacaacaagaggaagaagttcctcaagctcaaaaaaatgagagaagagctaacgttgtttctatcaattcaggcgtaggtgctactagcaagattgtattgtacgaaccacgtgtatattccgatgcaaaagaagtagctcaaaatcttctaaataacaaggctgttattattaattttgctcgtatggatgatgaacaagcacgtagaatagttgattttattactggtactgtttatgctctaaacggtgaaattcagcgcgtaggcgataagatctttttggcaactccacctaaatttgaaactgatggcaaaattgctgaattagttgaaaagaaagacaaaatggattaatgatattttcaattgtaggctggatattacgtatcatttccgatttattgaatatctatagctttctgattgtaatttatactttactaacttggattccaaggttacttgtaactaaagttggacgagtactaggaaaaatcgttgagccttatttggagatatttgaacgttttatccctccaatagctgggatttcttttgctccagtggtagctttattagtaatttattttgtaaataattatgttctttattggatagcaaatataattaggtacgttcttattagataaaatggaaaaaagacaagctagtagtttttatcaacattttgatgaaagtgaaagaccgacggtagattatttcgtcggtctttttaatcaatttttatttaaaaatgagccgattttaactgatttcttaaatcctagggaacaatatatttttagagaaattgttggtggctatgcacaattgtatagttttggtggcttttcaaatgctgaaaaaaagaggttgcttctatgtgattggggtcaagcatatgagccgtcgatgtttaaagttacgcttttggaaattgattatccgcaaaaatggtctgaacttacacatagtcaaattttgggagttttaacccatctaggcattgaattagatacttttggggatattatcaatgatgagaatggaaagtggcagttttttgttaaaacagaattgaaggattatttcattgaacaagttactcgtgttggcagaacaaaagtaaaattacatgaccttccactttcaaaagttttagcgcaagaagatgatagtaaagaattgagtgtaattaccatttctttacgtttagatgcagtggttagcgctgttaccaatttaagtagaagccaggttaagaaaattattgcagatggtgaagtgaaattaaattggcatcttgtagctcaatctaatataattgtttctgtacaggatatgtttagtattcgccattatggtagatatgagattattaatcttgccactacgaagaaaggtaagaaacgacttgaaataaaggcatggcaggcaaagaaaaggtgataatatgacattaacgccaatggatatccataataaggagtttgcaactaaacttcgtggatatgattccaagcaggtagatagttttttagatcgaattgttgatgcatatggagatgcacttgatcaaattgttgatttaaaaaatgaaaatgttgaattaaaaaaacgtgttgataaatatgacaaagtaaaagattcgatcaatgaatctttaatttctgcacaagaaaatgctgaagaaattaaaaagaagacaaatatcgaagctcaagaaattatcaaaaaagctaatcaagacgcagatgatattcttaagaaggctcaagatgacggtgataaaaagagagctgaacttcagagccaatatgatactttgaatcatgattatgatttactgaagggaaaagttgaagacttcagagaagccattcaaggaatgttaaaggatcaagttaaagaattaagtgattcagattggcaatactatttagataaatattatggtcgttcacgtttgtacccagcagatggatcgcaaccagttgaagatgagtcaattcctgatggcccaatggataacgaagtagcaccacaagaaaatgttgcatcagctaatccagaggttgacaataatgcggtaaatgaagtaaactctgttcaagaaaaggaagataaaccaggtgtattgactggagatagtccagttaaggaaagtatgcatgctacagaagaaaatactcagcggcgtaatggtcctgtaattattttccctgatgatttaaaaaataactaatttaagtcgacagtaccaacaagtagacgatttagcgagttagtgatggtgaaagactaacacttgtcgaaagttaatcagctgccaattggcttaaacgtttgtctgtgcgatacacagatataagtggaatggaataactgtattctgttgttctgttcaagttaggtggtaccacgagaagcttcgtcctatttaggatgaagctttttttatataagaaaggattttttatgagagtcaaagatacattgaatttgggcaaaactaaatttaagatgcgcggaaatcttccagtgcgtgaagctcaatggcaaaaagaatgggaagaaaataaattatatgaacaaagattaaaactcaatgaaggtaaacctcgctttgaccttcatgatggccctccatttgctaatggtaatattcatatgggtcactcattaaataagatctctaaggatattatcgttcgtttcaagaatatgaatggttattatgctccttatgttcctggttgggatacgcatggtcttccagttgagcaacagttagctaaaaaaggcgttgatcgtaaaagcatggatcgtgcaaagtatagagaactttgccgtcaatttgctgtagaacaagttaagaagcaaatggctgactttaagcgcttgggagtaatggctgattgggatcatccatacattactttacaacctaagtttgaagctgaagaaattagagtatttggcgaaatgttcaaaaaaggttacatctacaagggtaagaagcctgtttattggtcatggtcaagtgaatcaactttggcagaagcagaagttgaataccatgacattaagtcaccaagaatctatgttgctttcccaattgaagatggaaaaggaattttagattcagatacttcacttgtaatttggactactactccttggaccattccaagtaacgtcggaattactgtaaatccaaaatttgattatgtagttgttgaagttaatggtaaaaagtatgtaatcggtgctgatcgtctttcagcagtcgctgaggatttaggttggaaagactataaagtcctcaaaaccttaaaaggtactgacttcgaccggatgacatatagacaccctctatatggtaagactggtttaggtcaatatggtctagttatgaacgatacttatgttactgatgatgatggtactggtttagttcacaatgctactggttttggtgaggatgactacaatgttggtcgtcgttatggcttggcagtctttggtccaatggatgcacaaggtagatttactaaagaagtgccagatcctgacttagttggtatgttctatgatgatgctaacaaagtggtgactgataagcttgaaaaagctggtgctctcttaaagcttagtttcttcactcactcatacccacatgattggcgtactaagaaacctgttatctatcgggcaactacgcagtggtttgcttcagttgataagttcagagatcaaattttagccgaaattgaaaaggctaacttcattccatcctggggtaaaactcgtctttacaatatgattaaagatcgtggtgactgggtaatttctcgtcaacgtgcctggggtgttccacttccaattttctacgcagaagacgacacaccaattgttactccagaaacaattgaacatgttgctcaaatctttgaaaaggaaggctctaacgcttggtatactcacactgctaaagaattacttcctgaaggatttaagtcagagcattcaccaaatggtaaattcagaaaagaaactgacattttagatgtttggtttgattctggttcatcctgggctggtgtaatgaaagaacgagatggtttaggattcccagcagacttataccttgaaggtagtgatcaataccgtggttggtttaactcaagtttgattacttcagtagctgtaactggcaaagctccttataagcaagttttatcacaaggatttgtgttagatgataagggacacaagatgtctaagtcattaggtaacgtaatttcacctaatgatgtaatcaagcaaatgggtgcagaaattattcgtttgtgggtagccggagcagatactacttctgacgtcgttgtttctcaagatatcttacgtcagtctgctgaaagctaccgtaagattagaaatactatgcgttttatgcttgctaatactactgactttgatcctaagcaaaattcaattgcttacccagacatgtctggtgttgatcagtatatggagatcaagttgaatcgcttgattgaagaagctattgaagcatacaataagtttgattttaatagtgtttataagaaagtatttagctttatttcaaatgacttatctgccttttacttagattttgctaaggatgttctttacatcgatccagaagatagcgaaactcgtcgctcaatgcaaactgtgatctatgacgttttagttaagttaactaagttgatgacgccaatcttgccacatacgatggaagaagtttggggctatttaaaggaaccagaagactacgttcaacttgctaatatgccagaagtagagcattttgctaatgaagatgaagttctagcagactggaatgactttatgaaggttcgttctgacgttttaaaggctcttgaagaagcacgtagcgctaaggtaattggtaaatcatttgaagcacacgttactctttacccaactgaagaaactagaaaacttcttgataaattaaatgcaaatgtaagacaaattttaatcgtttctgatttaacagttagtgatgatcaagcacctgaaaatgcagaaaaattatcaactgcttcagttgtggtagaacatgcagctggtgaagtttgtccaagatgtcgtcgtactacaactgatgttggtagtgactcacgcttcccagaattatgtgcgcgttgtgcagctattgtagccgaaaactttcctgaagcagaaaaagaaggtttagagaaataatgcgtaagggtactgttaaacaatttgattcgaattctgcgtacggatttattgaggatgatctaacgcactcatcttattttgttttttataaatcgattaaagaagaaggttataaaaaattaaatgtaggtcaaagagtacgttaccaattagcacaaggaaaaaagggtctacaatgtatcaacgtttatgttgatcgtgactaaaaggagaaattaagtgaatctaagagaaactgaaatctcaaacaagcctgtattcgaaggtaggcttatcgacttaaacgttgaaactattagtctaccaaatggaaagacagcaactcgtgaaatagttaagcatcccgatgctagtgcagcaattgcaattaatgatgagaaaaaaatgcttcttgtgaagcaatggcgtgagcctatcaaacaattaactctagaaattcctgcaggtttaattgacgaaacagatgcatcaccccttgatgcaatgaaaagagagttaaatgaagagggcggctataaggcagaatattgggaaaaggtaagtgaattttatacttcagttggattctgtgatgaaaaaattcatttattctattgtgatactttgtcaaaaattgagcacaaacgtcctcttgatgaagatgagtttctaactcaagaatggtacagtcttcctgagttaaaacaattaattgcgtcaggcaaaattatggatgccaagactgttatggcaattacattctgggaaaatatgattttaacaggaaaccaaagtaatgactgaaaaacgagcagattatcgtaaaaaacaacagcagaaaaaaataagaaaaatctttgataattttaagcgcttgaagaaagatgatcaatctattgatgcggttgattcagaatcaacagttaaagaatcttcggattttgaatcaagggagaacttttcttcagaagaagagcgtgaaaatagaattaatcgtttaaaaaagcgcttgaactatgcaattttaattgttgttgttttactaatcatagttttgttcgctttatttaaactttagatttagaggtaaaaaatgaaaattgcgattattgttccaatggaagaagaggccgaattttataaaaagcattttaagtctgaaactaaagaagtttttggtacaactgaatttgatcacttttcaattaatggaaatgacatttatttaggtcttagcggaattggaaaagttaatgcggcaatgaatttaaccagtttattaactaaagaagatattgatttggtatttatgactggttctgctggttcaatgcaagaaaatgtgaaaagaaaagatttaattttggtagatagctttgcttatcatgatgcacatcgtgttagtgctggcgaatacgttgaaggtcaaattccacgtgaaccagcaagatttgatcttaatagcccagcacgtgaagcatttaagaagtatcttttaagtcaaaatatagactttaaagaaggtcttgttgtaactggagatacttttgtacaatctgaagcacaaaaagatgaaattaaaaagaatttttctgatgcacttggtgtggaaatggaaggagcggcctttgcccaagttgctagacatttcaacacacctttagttgctattcgcgctatttcagataatggcgatgctaatgccgataatgactttgataagtttgttaaagaagttggtgctaaagcagccagcgtaatttcatcttatcttgaagaaacagttttagattagggtgatggtagactaagttcagatgaacttagtctattttttatgttaaaataaaatagccacttccaaaatgtaagaaagataaagaggtataacatgactagaaaaaatgtatatttggataatgcggctactactccgatggatccaaaagtaattgaaaaaattagtagtgagatgaccaatgattttggaaatgcttctagtcaacatgcatttggacgtaaggcacgtcaagtggttgaagcagctcgtcaccaactagcagaaacaatcaatgcggaagataaagaaatcatttttactagtggtggatctgaaagtaataatactgcaatttttggaacagcacgtgctagaaagaatattggcaagaaaataattactactaggattgagcatccttctgttttgaacccaatgaaacgtttagctcaagaggggtatgaaattgtctatcttgatgtagatgaaagtggacatattagtttggaagacttaaagagagaattaacgccggatactattttagtttcaataatggcagtcaataatgaagttggttcaatcatgcctctaaaagaaatcggtgaattagttaaagattcaaatgcttatttccacgtagatgatgtgcaaggatttggaaatattgaaattgatgttaaggatatgaatattgatttattatccacttctgctcataaggttaatggacctaaatttttgggctttctttatgaaaaaaatggcttaaaggtaagtaaccttcttttaggaggggagcaggaactaaagcgtcgtccaggaactgagaacgttccaggaattgctggctttggcgtagctgcccaagaattgagagaaatggacaaaaagcagcttcaggaaaattatcgaaagtttcaacaaataattcttgatgaacttgataaaaatgatattgattatgaaattaacggctcacttaagggagcagtttctcatcacgttttaaacttgtggttaaagggcgttggaacttattctgccttgactaacttagatttgaatggctatgcagtttcaggtggatcagcatgtacagctggttcattaaatccttctcatgtcttagaggcaatgtatggtgaaaattctcctcgtattgaagaatcgattcgaattagttttggacgttttactactgcagaggaagttaaaggttttgcggatagcctagttaaaatgtgtcaacgattaagtaaataactcacaagttctaaccatttttggctagaacttgttttaatgtataatgttattgaaaattatatacttgacacttacaaaaaataagataataatattgagagtgatattttatggcaaatacagtaattattaatggcgataatcgtaaatttacaatcagtccagaaattaagcgttacgctttaattgatgcaggttttacgaagactaaaagaggaaatttcatgtataagcatcctttatataatgaatctccttataatgctacctgtcaattgaagttaacgattaacgaagatttagatcatttaacaatggtagtcactgatactaatggtttacagaaagttaatatttttaaaaataagcaattagcaccaatggttgaattacttgacttcattttaaaggatcttgaggatcgtcagattattgcaccttgctaaaaggagaaaaagataaaatggtagataacagcgaaattagagtcgttgttgggatgagtggaggagttgattcttcagtttctgctcttttactcaaacaacaaggctttgatgttgtcggcgtcttcatgaagaattgggatgatactgatgattccggagtttgtacggcaactgaagattacgaagatgtaaaaaaagttgcagatgaaatcggcattccttattattctattaattttgaaaaagattactgggagcgagtatttgaatatttcttaaatgaatataagaaaggtagaactcctaatcccgatgtaatgtgcaataaagaaataaaatttaaatccttcttagattttgcaatggatctagatgcagattatattgcaatgggtcactatgcagctactaaggttgatgagaatggtattgtacatatgatgcgaccaaaagatggcaataaggaccaaacttacttcttaagtcaactttcacaagatcaattgaaaaaggtaatcttcccgcttgctaacttaactaagccacaagtgcgtgaaattgcaattgacgcaggccttgccaccgctaagaagaaggattcaactggaatctgttttattggtgaacgtaactttaaaaagttcttgagtgaatttttaccagctcaatcaggaaagatggttactcctgatggaaaagttgtgggcgagcatgctggattaatgtattatactatcggtcaaagatccggtcttggcttaggttcaacgaaggaatcaactgatccttggtttgtagtaggtaaggatttaaagaagaatgaattgatcgttgagcaaggatacgatagtaagcttttatatgctactagcttagatgcaagtggcgtatccttctttactggtcagccggagcatgatattgatttgaagtgcactgctaagtttagataccgccagccagatgttggtgttactatgcattatcatgcaaaagataatacagttcatgttgaatttgatgaacctgcacgtgccgttacgccaggacaggcaattgttttctataatggtgaagaatgtcttggtggggcaactattgaccgtgcttaccaaaatgaaaagcaattgcaattagtatagtcaaaagaagtctcaatgaggcttctttttgcttttagaaactgttattttctgtcctgaaaacttataataaatagtaaaagtggagggaaaagtatgcaattatatttcgttagacatggaaaaacaaagtggaatttagaagggcgctatcaaggaggtagtggtaattcaccactcttaccagaaagctatgaagatattaaaaaattagctgagtacttaaagggaactaagtttagggccttttatgctagtcctttacaacgtgctttaactactgctgtaatgcttagaaatgatatggggattactgttccagttattgtagatgatcgcttgaaagagtttaatcttggcgatcttgagggaatgaaatttgttgacgctgagagtcaataccctgatcaaattaaggcctttcgttattcaccagaacgctacgatccatcaacttttcatggtgaagactttgaacacatgattaaacgtggtaaaagtttaattagtgatattgttaaacgctatccaaataaagatgataaggtgcttttggtgagccacggggcagctctatgtgcattaattagaactcttgaaggttatgacgttgctgatattagaaagcgcggtggcttgactaatactagcttgacgattcttgacactgaagatcaagggaagacctttaatgaaatagcatggaatgaaacaagctatttagatcgaaagattactagtagggatacaatttaaaaatggataaaaaaatagccaacttatatgatgctggcaaagttgataatgctatacacttattgattaaaaaaataaacaatcatcctaaaaatatagaaaattatttacagctttcaacttatttgattgaacaaaattcggcagatcaagctttagaattattagaaaaagcccgtggacttgttgatcagccagaagccttaacctataacattgctgtttgttattacatgcaaggagattttgctaaatcactggctttacttaattcgattccagacgatgaagagaccatgtatcaaaagtcgttaatttttatgaagttaggtcaatatcaaaaggcattagcttatgctctaactttgaaaaatcaggatgagaggactttagaattaattggcgacatttggcttagtctgggtgatttaaaagcggcaaatcaaacttacagtaagatcctagaagatcaaagaaatgcaaaagttaattttttgcttggtttaactttatttgatactaatcctgatgaggcagagaattactttaaattatcaaaagaacaggatcctaaatattttgcacaagcacaaaagcaatacaatgctgtagcaaaattgattagaggtaaaaatggcagaaactagttttactggacgaattaacggaattgtttttgaaaataatcaagatcttttcaaaattattgatgtagacttgattagtaaattagcagattatgatcgtgacaatatccgagtaactggtaattttggtgatattcagattggctcgacttacaagtttgttggtcaagttgttgtacatgaaaagtttggtaaacaatttcgcgttagttcatatgaaccagttttaccacatgaagagggaagtttagcgaaatatctaagttctgataaattccccggtattggtaaaaaagccgctgagaagattattgctagtttaggtactaatgccttggatctgattaagtccaacccaactgaaattgaaaaccttgatttaacgccaaagcaaaagaatagtttactatctgggattaatcaaatggactctttctcagaaattgttattaagctagctaaatacggaattaataaaaaaactgctggaaatatttataaagcctatcatggagattctctaaaaaaacttgaagaggatccttatcaagcagttggtgaaattagaggcttcggctttaggacagcagataatattggtcaagcacttggaattgaattaaatgatccaaaaagagttagaggtgcaattttaagtattttgcagagtgctctaagtacgctgggagacacttatgtggcactagatgatttactaactcaggcatatgatttggttcaagctagttcttatgacgacttggcaaatagtgtgaatgagcttcagcgtcaaggtaaggtggttgtgtcaggcgacaaagcagctttacagggaatttttcaaactgaacttgatatttcaaatgagttaaagcgtttagtcaaaaatcgggtagaaaaagaaaaattcagtgatgaaaaaattgagcatgcaattaatcatgctgaagaagaacttgaaattaagtatgacgaaacgcaaaaaaaagctattaaaaatgctttaaataatccaatttccattcttactggtggaccaggtactggtaagacaacaattattaatggaattttgatgtgtttaaaggaacttgcagagattccaagtggagccttgtatagtgaagatccgccatttttgttagctgctccaacaggacgggctgctaagagaatgagcgagattaccgatatttctgctaaaactattcaccgtttgttggggctaggtattggcgaaaatgatgctaccgatgttaatgaattaaatggtgaaattttaattattgatgaaatgtcgatggttgatatgtttctgttcaagcagttgttatcggggattaattcgacaaaaagaattgtatttgttggtgaccaagaccagctaccttcggttggagcgggaaatatttttagtgatctaattaagtcagaagcgtttccaacaactagacttcaggtaattcatcgacaaggggaagattcatcaattatcaagctagctcatgcaattaatgaagaagatgctgaacaaataatttttaataaaactaagaactattcctttattccgtgtcagccaaggttagttggagacgcaattgatcaaattgttaatttagctattaagcgtggttttgaaaaggatgacgttcaggtccttggagctatgtataatggtcagggcgggattacccacttgaatgacatcttgcaagatgtgatgaatccaatgtcttctaaaaccaaggtaattgaagcacataatgaaagttttagaatcggtgatcggattttacaattgcaaaataatcctgaaaaggatatttataatggtcaaattggcaaaattattggcctcaatcctgatgataaggctaaaatattaattgctgattttgatggccgagaaatagagtttagcgttaaagatttaaatgatattactcgtgcttatgcaattacgattcataaatcacagggatcagaatttccgttagttattttgaatcttactatgcaaaattatatgatgttgagacgtaatttgctctatacagcaattactcgagctgagaagaatctcgttatggtaggagaaaaaaaggcctatcttatggctttacgtacacccggaaatgatcggaaaacggatttagcttctaagatcagacatgaattgggtctaaaagaagtagttgagcatgattctaacgaaaatattaaacaagaacaggctcaaactgaagttaaagaagaggtaactgaacctaaagattatatcttaactcctgatttaatttactctggtaaaatcaacccaatgattgggatggaaaagatagaattaaaagcaagagattagcaaaacaagccacctcattatgagatggcttgttttatctttatttcaaaatattaaagtgatcaacttcaaattttaaatggaattttctcttatttaattcttctccatcaagttgaccatattccgattgataggtttctacttcaattttatttgcttcaaaataatgaaattgcttgctttgcatatgtgatccattgattagaagcttagaaaagagatacaaaaatttagctaaattaggtttttctacaatcgcaatatctaattcacgattataaatattagcaattggtaatattggaactccaccaccaaagtaggggtggttagttgttgtaactaagtatgcatgatcataagaataagtatgattattggctgaaatcttgaccctaaaattatcttgtcctttgagtgcttggacaatatttattccgtaagttaagttccctaaattgattttattaaacttagttttgagttttgaatgattggtcttattaaccacatacgcatcaaagccaattcctaaattattgacaaaatatttctcttcgcctgtaattaaatcttgatatctaccacagtcgacttttgttactgttggttgatttctaagtttcctaataaatttcgagggatccttttgtagtttagctgctcgagcaaaatcatttccggtaccagctggaaaataggcgagtggagtatcaggatgaagtgaactttttaccccatttaaagcctgattcaaagatccatcaccgccaactataacaatacattcatgattatcattaatttcattaactgtcgtagttgcaattggaacgagttgtccaggataagtagaaatttgaatatcatatgctactttttcattttttagggcagcctcaatttctttaagagcttttgcgcctttgttgctaccagattttaaatttacaagtaaatgaacctttttcatttttaattgcctaactcatataaaaataagccccgtttggggcttattttatttcttttcaattagcattggcaaaatcatcggtcttctttcagtctttgaatataagaaatcttgaagattttcaataattgcctttctaatttcattttcttttggttgtggatctttagccatttcagtcttaagaatgtggtagacatgtttctgtgcttgactaatcaactcagttgattcacgcatgtaaacaaaaccacgacttaaaatatctggtcctgctaagacacgttggtgcttgtagtcaacagttgctacaactaccacaagaccttcttcagctaaaatttggcggtcacgaacgacgatatttccaacatcatcactaccagaagtatcaacaaagacatctgggatattaatgtgaccagcgattcttgaagaatctttagttaaagcaagtacatcgccattttttaaaacaaaggtatgatctttagccatgccagtagactgagcagtttcagtatgaacaacttgcattctgtattcaccgtgaacaggaatgaagtattcaggcttggttaactcaatcatcatcttttgttcttcttgaccagcgtgtccagaagtgtggacattatgaatcttgccatgaacaacattagcaccagcttcagttaacttattaattaagtggttaacactggttgtattgcccggaatagggttagatgaaaagattactgtatcgcctggttgtaatgaaatttgacggtgagttccatctgcaattcttgaaagagctgcaagtggttctccttgagaaccagtacataaaatcattgctttttcaggtggagtatggttgatttcgttggcatcgactaaagttccttctgggatatttagatagccaagatcaataccattttgaacaccattttccattgagcgaccaaagattgcaacttttcttccggtgtcaacagctgctttaatagcggttgacacacgataaaggttagaagcaaaggttgcaaaaataattctacctttaattccagtgatgatatcgtgtaaggaatgagcaacgaatctttctgattttgtaaaggttggaacttccgcattagttgagtcagacaggagggcgagtacaccttcttgacctaacttggccatcttctgaaagtcaggggcaggttgactcattacaggagttaagtcaaacttaaaatctcccgtaaagacaactgcaccttctggagtatgaactgcaattcccaaagtgtcagggattgagtgagttgttctgaaaaaactaactgaaagcttatcaaacttcaaaacagtatcttcatgctcttcgtgaagctcactagaatttaaaattccatgttcatcaagttttccgcgaattagagcgagagcaaatggagttgcataaactggaatttcaggaattttctttaaaaggtaaggaatcccaccaatgtggtcttcgtgtccgtgagtgacaaccaatgctttgattttttttctattcttaacaaggtaagaatagtctgagataacataattaattcccatcatgtcatcttctgggaatttaataccgcagtccatgatgataatctcatcttggtactcaacgcagtacatattacggccgatttcgcctagaccccctatagcgaaaacgccgacttcgttattctttaatttcaaggtcgttatttatcttcagatttgaaagttgtcagcttaaaatctggattttgcttttcgtaagcaagtgagtttccagttaattcttggatgagttcaatgttgtagggggtattatcctcaaccatagttcttgctgcaactacattatctgcttctaaaaaaagagttttagtagtttctcttcttggattaacgatctggtctttttggtataaaactttgtagatcatttcttataatctccttatattaaaacgttcaaaaaaacttctgcgaaaaagtcgcagaaattcatagctattaaaattttatcataaacttacttttaagtataccaatttacttcatatatagtacgtaaaaagacgatagagttttttgccctatcgtctgatttcaaaaatcaaaactaaatttttaagaaataacaatggtatcttcggctaaatcaaaaggattttgcttattgatacggtcatagaataagtgaccatttaagtggtcaatttcgtgagaagcaacaattgctggataatcttttaggcgaattgtcttttcttcaccgtcaactgtataataatgaatctttaacttatcaggacgaggaacatagccttcaatatctttatctacacttaggcagccttcgccttcagcaagacaagcttttcttactgattcagaaataatttttggattgacaaaaacttccttaaaaataatttcacctttatcatttggaactaaaagggcagccatttgaatgctcttgccaacttgtggagcagctaaaccaacgccagctcttaattggtgcttttcagcaattttaggatcttgcgaattaattaaatattgcatcatttcatcagctaattctttgtattcatcagctaatgggaaagttaatggcctagcaacttgtcttaaaacggggttgccatcgcgcgtaatatcatgcattaaaatcaaaataattatctccttaattttaaatttgctatgaatatgataacaattgaaagaaaagacggcaataatcgaagtttttggtataatatttttgttaaaaataaacagttcacagcttgtactttcgttgacggcatgatatttttagagtagaattgtaaaacgaaactatagagatataaagcttcaataactgcattattattttgcataagatagctgtgactggagtcacagtttttttatgaagttcggggaggaatttcttttgcaaagaagagacgatattagaaatattgccattatcgcacacgttgaccacggtaagactactttggttaaccaattattaaaacaatcagatacattgccagagcacatgaacctagaagaccgtgctatggactccaatgctattgaacgtgaacgtggtattactatcttatctaagaacactgctgttaagtatggtgacactacaattaacatcttagatacaccaggacacgctgacttcggtggtgaagtagaacgtatcatgcacatggttgatggatgtttattacttgttgacgcctacgaaggtactatgccacaaactcgttttgtgcttaagaaggccttagaagctggcgttaagccaatcgtagttattaacaagattgaccgtccaggtgctcgtccaaaggaagttctagatgaagttcttgaattattcatcgaattaggtgctagtgatgaacagcttgatttcccagttgtttatgcatctgctttgaatggtacgtcttcatatgattcagacccagctaagcaagaagaaacaatggatcctatttttgatactattgttaagaatattcctgctccagttgacaattctgatgaaccactacaattccaaattactatgcttgattgggatgactatgtaggacgtatcggtgtaggtcgtatttaccgtggaaaagttaaggttggggacaacatcactgttatgaaacgtgatggctcaactcaaaacttccgtgttactaagttattcggttacttcggtttgaagcgtaacgaaattcaagaagcaaaagctggcgacattattgctatttcaggtattaatgatatttatgttggtgaaactattgcttctgcagataagcctgaagcattaccacttcttaagattgatccaccaactcttcaaatggactttgttgccaatgactcaccatttgcaggtcgtgaaggagaccaagttactcctaagaaacttgaagaccgtttgattcgtcaaactcgtactgacgtttctttgaaggtagaaccaactgatcaattaaatgcttggactgtttctggtcgtggtgaattacacttgtcaattttagttgaagaacttcgtcgtgaaggattcgaattgcaactttcacgtcctaaagttatctaccgcgaaattgatggtcaaatgtgtgaaccatttgaagcagttcaagttgataccccagatgcttatgtaggttcagttatcgattctctttcacaaagaaaaggtgaaatgaagaatatggaatctactggtaatggtcaaactagacttgaattcttagtaccatcacgtggtttgattggttacaacaatgaattcatgtctcaaactgctggttacggaattatgaaccatacttttgattcatataagccagtagttaagaactgggaaccaggtcgtcgtaatggtgctttggtttcaattaaccaaggtcaatcaactacttactcacttcaatcagttgagcaacgtggtgaattattcatcggtgctggtgttgaagtttacgaaggtatgattgtaggtcaatcttcacgtgaacgtgatattgctgttaacgtaactaagggtaagaacttaactaacacccgtgcagcaggtaaggaccactcagcttcaattaagactcctaagactatgactttggaagaagctattgaattcttgaatgacgatgaatactgtgaagtaactccagaaagtattcgtttacgtaagaagatcttaaatactaacgaaagaaaaaaggcagataagagacgtaataagtagttaaattcttatttgattttttaaaagtagctcattttgtggagctacttttttttatccgtaaaggtagtgatataataagaaagattatttaactaaaggggcaagtatatcgtgcgacaaaaattaagatacttagactatagcatcttgatcccatacctgattttgtcaaccattggggttatcatggtctattcagcaagttcggatattttgttagtaaatggcttttcacctagtgtatatatgaaaaggcaaattatatattttgttgctgcatttttattctttggaattccatgttttgctttaaaattaaaaatattcaaaaatagaaaatttgttatgtcttatttaggcatttcatttttaatgctattctttttgattgtcttgaaagtaattagtcatggaaaagctgctattaacggtgcagttggttggatcaatttaggttttattaatattcaaccagtagaagtagccaagttgtctttagtattatatttagcttttgttttatcaagacgtgatggaaagtttgttcccggtcagatttggcataatttatttgggccaacggtcatttcatttatgatgattgggctggttattttagaaccagattttggtggatcagccattctgtttatgattgtttttgtgatgtacagtgtttctggtattcccactaagttagccgtgtattggcttattggacttttcattgggattgttttgctgatgctagtgttattggtttggacaccaggatttattaaggattcttatcagttccagcgcttgttagcctttgttcatcccttcaaattagaaaaaactggcggtgctcagttagtcaattcctattatgcaattcataatggtggtttatttgggggtggcttaggtaacagcatgcaaaaaagaggttatttgccagaaccatatactgactttattttatccattactgctgaagagttaggtgtaattggtgcaattgtgattattaccttattgttcttcttgatgtggcacattatggaagtaggaattcacgctaattcacagtttaatgctttagtttgctttggtgtagtaactatgatttttaccgaaacgctctttaatgtaggagcagttttgggtcttttaccgatcactggggtaaccttgccgtttatttcttatggtggatcttcaatgattgttctaactgccgctttaggattagtcttaaatatttcagctgctgaaaagaaggcaatgatagaaagtaggagtgtactttgagtttggtttttaaagatgagccaaataataaaatgactgcgcgcacgcaggtaattgtttggctttatcaaattagcgatcaatacaagttgcgccgatttggcaatattatctatttttcacgtaaaaataagtatgtagttctatatgtaagttcagaatatgctccaaaggtaattgctgaattaaagagtaagaattatgttcagtcagtagagacttcaaaaacagatgagcttgatttttctgctgaacacgaagaaaagatgatgcgtgaactaaaagaagaagcagaaaaattacgggaagaaaacgaggatttacgagtttgagaattattgcaggaaaatatgctaagcgtaatttacatactttaaaaagtaatgctactcgtccgactagtgataaagtaaaaggctctttatttaactctttaggtcaattttttgatggcgggcaagtattagatttgtatgctggtagtggagctttaggaattgaggctgtttcgcgtggctatgacagtgcagttttggttgatattagcggtcaggcatgtcaaattattagaaaaaacgttgagcttactaaggaagaggataggtttagagttctaaaatgcagtgataatcgtgcaattaaaattttaaatgaggaagagaaaaagtttgatttaatttttcttgatcctccgtatgctaagcaaaaaattgctaagattatgactaaactgcttaaaaataatttattaagtgaaaatgcattggttgtagctgaaactgatgaacatgatgaattaccagaagtttctggcttttcaattattaaggatcatcagttaggtagaacaaaagtaaaagtttacaagagggagtaaaatgacaaaggcaatttttcctgggagtttcgatccaataaccaacggtcatgctgaagtggttgaagcagcagctagaatgtttgaaaagctgtatgtagtaattatgacgaatacaagtaagaaatatctttttgatgaaaaagaacgcttagatttggctaagaaagtttttgaaaacgacaaaaatattgaagtaattgctcgtccggctgaattgactgttgaagtagcgcatgaacttaatgcaggggcaattgttcgaggattgagaaataccactgattttaactatgagcgtgatattgctggaattaataagactttagatccaaagttaaatacagttttattgtttactcgtccagaagatagcttcatttcttcaagtatgattaaagaaacagtattttttggtggcaatgtttcaactctagttccaaagccagtggcagctgccttggaagaaaagctgaggaatcaaaataatgaagaaaaataaaaaaataaaattttggctgctaggaatagcagcatttttaatagcagttgttttttgtctatggcctacgcaatactatattgaggcaccaggtgaagctttccaaattagtaagtatgttaaaagtaccagaaaacctaatcctaatttttatctagtaaccgtgagtgagcgtcctgcagttatgattgattatttaactagctttcttagaccaggagatagtcggtattcaaaaactgaattaatggggacatcaagcagtactgaatataatcaaatgcagcaatactacatggaaactagtcagaacaatgcaatctattacgcagctaaaaaggcaaaagtcccttatcgtcaagaatttttaggcgtttatgtgatggaagttatgaaaatttcaacttttaggaagaagttgaaggttggggatgttttagttagcgtgaatgatagaaaatttacttctagtggagaattaattaagtatgtttcttctctgaaagataaaaaggtgaaggtagaagttattcgaggaaagaagcacttaactttttcgggaaaaacagttaaattatctggaactagtcgctatggaattggtattcaattggtagatcatacgaaggtcgtaaccgatcctgcagttaaaattgatgccggagatattggtggtccgtctgcaggtttaatgtttacacttgagtgttatcaattgtttactggtaagaatcttagttctaagaaaatagctggtacaggaacaattgatagtaatggtaaggtaggaatgattggcggtgttgataaaaaggtaatagccgctagccgtcaaggaatgaaggtcttttttgcaccaactgatcaaccagaaggtgttaaaaagagtgaaacaaactatgctgaagcagtcaggactgcaaagaaaatacatactaagatgaagattgtaccagtggaccgttttgaagatgcactaaattatttagaaaaataaattgaaagcagcaaaaaaattgctgctttttttcgtaataaataatgaggtgataaaaatggatttagaaaaaatcaaagaattcataattgaaaagaaaattgttgtaattggagttattgttttgatcctaggcggaggatatttgattcagaaaaataatcagccggcagtcaataatactcaagtgttgagtgaaaataataagacgcagccagcagaattttctaaaagtgagaataaaactactcattctacgtcaaacttaaatagctcctcaaaacaaaacacagtaactgtagatattgctggagctgttaaacatagtggcgtttatatattaaaaaatggtgctagattaaacgatctgttaaagatttgtggtggcttaactgataaagcagagacgcgtgcgattaatcgagcagccttattaaaagatcaagatcaaatttatgtcccgcacattggtgaaaaagtagaaaatcctcctggaaatggaacttctaataataattctgctgcttctgattcttctagttcaaattcagagcaagttcatttaaatacagcaacagtgcaggacttacaaaagctaaatggcgttgggcaaaagaaggcagagcagattattgcttatcgtgatcaaaatgggggctttaagcaaattgaagatttgactaaagtaacaggaattggtgaaaagacttttgaaaagctcaaagatcagttggcactctagtttttatgcccctggattttatttattacttggtctgagttgtatttcagtgacttttattgttttgcaggccactagttttgcccaagtttttgttgccgtattatttttaattattttttgctcactgttaatttataaatttccgcaatattggcatttaattgcaatatttgagactgtaaaatagtttgtgtaaggatgaataattccttaaatttatttcttaaaacattagaaaaaggagttcctttctcgtatgattggtttgaacaaaaaaacacatacagaaagaagaactccttcatgaatgattttaccaaaaatatagcacaagctctattcaatcaagacaaaataaacgatttattgcgcaaagaactccagcaagcagttaatgacctattagaggctgaactgactgcgtttttaggctatgatccttatgccagagctggctggaatacaggcaattcacgcaatggtgcttactttcgcaaggttgatacgcaatttggcgagattaaaattcaggtgcctagggatcgtaacggcatgtttcatcagcacacgctccctgactacaagcagcactccaatgtcttggaaagcatgattatcaagctatattccaaaggcgtaaccactagagaaatagccgacttgattgaaaagatgtatggcagtcattacagcccagctcaggtatctaacatctccaagcagatgattccaaaagtcgaggcctatcatcagcgcaaattcagtgacaagttcttctgcgtttatttggacgctacctacattcctttgcgtcgcataacctttgatcgtgaagcagtttatattgccattggcatcaagcctaatggtcacaaggaagtcatcgattaccgcattgctcccagcgaaaacgtcgagaattggacggaaatgcttcaagacatgaagtctcgcggtctagaacaggttgagctctttctttcagatggcgttgtgggcatgaagacagtgctggagcagacttatccgaaagctcattttcaacgctgtctagttcatgtcatgcgcaatatttgcgctaaagtacgcgtagatgatcgcgaaacgatcatgaatgaattcaagcaaattcatcaacagccaaataaggaagccgcgatcaaagtcttgcacgccttctatgacaagtggaacagcgcgtacaaccatgtcatcagaaatctcaaagagattgaacctgatctgctagtcttttacagctatcctaagcagatcagggcttcaatttactctaccaatatgatcgaatcctttaacaacgttatcaagcgtaaagctaagcctaaagcagagtttccaactgaacagtcgcttaatacttttattggcattcaggcaatgagctacaacgaacgctatttcaatcgaatccacaaaggctttggtcaggttcaggataccttagaatcctactttgattaaataaaagattaaaaaatcaatctacgagaaaaatctatttacacaaaaaatttgacagtttccaatatttttaggagtagttataactttatgttttattaatcaaagaataaatgaattaaaaattggagagccaattagaatatatagtgatcaagttaaggtgagtgataattttttttacggggaaggaaagctagagaagaataaagttttaattagtggaactgcaaataagtcttttgaaaaagaattaaacaaatatcatgcaatttatttagtaaactacaaggcaaaagtagaaacaattatgccagcaactaatcctggtgaatttgattatcaaaaatattatcgcagtaaaaagatcaggaaaagagttaagcttgagagctatcaaatttatcccaggcagattactatttttgattgggttcatatgctacgtaaattcttaatagattattttgaaaaaatgccacaatatactagattttttgctagtgaaatggtgttagcacaaaacccaagtgcagataataaggctttattaaatagttatcgagacttaggcattattcatcttttaagcatctcaggcttacatgtaagtttatatattttaggaattatgtggcttggaactatgatgaagaggactgaagaagaagtaatcttatgttgcgtagcttttttaatcatagaaattttactgtctaattttcaagctgggtttgtacgtgcaagtttaagttacttttggagcgttttctttaatagaaaaaagattatgattagcagcggagataagctcggaatagtagtattatctcatttgatctttaatccgcttctatttttaaatagtggagctattttgagttatttactagtctttggactagaaataagtaagaactttggaaaaattaaacagaatatcgttcttaactcattagttacaccaattttattaaataatttttatcggatttttttaactgtcgtttataattttttaactgtcgttttaattttttaactgtcgtttataatttcttaattgttcccatttttaattttattcttttaccattgacttttatcgtggttttttcattttggtgtttgccggcgattgtaaaattaagtgaaccgatttttaaaggtctcgcggatttaactaactttattgctgataaacaatggggcctagtaacttttggtcaaatagattggctgcaaacaatatttttattagttgtgacagtatttttaattattttacctaaacataaaattctaaaattaaagttaagatcgatcatagttggagcatatgttagtatgtttttcttgattcattttcctttaaaagggcaagtttcttttattgatgttggccaaggtgatagcattttgattacgacacccttgaatagaaagacttatttgatagatactggtggaaaattgaattttggtaaaaagaaacgtgaaccacaattaaatcgaattactcttccgtttttatatgctcaaggaattgatcatttggatggcgtttttttaagtcatcaagatgcagatcatattggtgatttgaaagcactccttgatcaaatcccagtaaagaagctatattttgcacgaggtttaacagaaaatcaatcttttatgaagaaaataaatggtcatttaaaagatgtccaattggttccattacttgctggggatagggttaagactaaagatttaagttttgatgtagtttatccttttaagcccggcttagggaaaaatgaagattctttatctttgacttttaagttggcaaataaacgttggctttttaccggagatttaggccgagaaggagagaaagaaattctaaatcattatcatttgcaggtagattattttaaactcgggcatcatggtagtaagacttctagtgatccagactttttaaaacaattaaatccgcaactcgtttttatatcatcaggaagaaataatcgctttggtcatccccatcaagaaactttaaaaacattgaaagacttgagcatcccatatttaaatacacaagatagtggtacaattacttggaattactcaccgtttagaggtgagacaattacgactttttataaaggaaatacaaaatgacattaatctctctttttaaacagactaatccgaaaaatgctaatcttttgattcagggaccagattctttttttaatgattatttagtgcgtaattatcttaatcaaaagaaattttcaggccttgatcaagtaattgtggattgccttgaagatggattggatgaattaatggctactttaacagagtcttctttgtttagttcccagaaaatggttgttgttaaaaatcccttctttttaatggctaaggttccacaaaagtacaaaaagcaaattgaaaaactaactaaaattatcgaacatttagatgatttagaagatatagtaatttttgtagctaattatgaaaaaattgatcgccgaaaaaaggtcagtaagtttttgcttgagcatgttaatgtcgttgaaacatcccttaagccgtatgaagtaagtggagtaattaaggcaattagcaaggaagagggctaccaaattacgaacatggcgctgcaaattttaatgcagagaagtgatcaagttcttgatgcagcgttaagtaattacttgaaattaaaaaatattgttggagaagataaaaaaattacagaaactctaattaatgaaaatattgatcgatctctttcagaaaatatttttgaaatattaacggctgcttttaataaaaattatcaagaagctacgcagcgtttagacgatcatctaagagagggagcaagtgcgattcaattattggctatttttgagtcacaaattgagtttttgacttgcgttaaagttctccaaaatcgacgctggagcaaagatcaaattactaaagagttaaaggtaaatccatatcgggtaaagttagcgatggagaataaagtttctttgaacaagttagcgagcctattaaagcaagcaattgaacttgattttagatataaaaatggaacttatcatggggatgagtttttaaaacttttcttattaaaaatttagatgacaaaaaagcccggagaaaaatctccgagcttttattttgtctaatataaagtgtcaagcaagtgattacttgttagcagccttcttagataagcgtgacttatcacggttagccttgttcttagaaataaaacctttagaagcagccttatctaaagcacgtgcagctttaacttctaaatcgaggacatcttttgcgtcattttcaacagcttcgttgaattttcttacagcagttctcaatttacttaattcagcagcattgcgcttgttagcagtagcagtagtcttaacacgtttaattgctgatttaatttgtggcatcaaaatcacctcgataaaatagatttactcgttaattatacttaatagaagcttttggtgcaaggtaatttgggcttgcttttttaaaaacttcaatgtaatattattatttgttggaaccattaacgctgttttcccgccgccgacggttaacgttgttaatggcaattatttaaaagagaggtattttctaatggctatttcaaaagaaaaaaaagatgaattaattaaagaatacgcacgtcacgatggcgatactggttctccagaagttcaaattgcacttttaactagtgacattaacaacttgaacgctcacttaaaggctaacaagcaagaccaccactcatacgttggtttgcttaagaagattggtcaccgtcgtaacttgcttcgttacttgaagaacaaggatattcaacgttaccgtgacttaatcaacaagttaggtttacgtcgttaattttaataattcataagcctcagctactctttgtcatgaagagtagcttttttgtttctttcaaattcatataagtatatggtaaaattaattagattaacttcgttttgatcattaagatccataaataatttaagtaaatatagaaagaagcaagaaaatgtcacaaaagattaagataatgatcttgggtggcgcacgtgaaaatggtaaaaacatgtacgctgttcaagtagaagacgaaatttttattatggatgcaggtttgaagtatcctgattcatctttactcggaattgatgtcgtaattcctgacttggatttcttccgtgattatggcgataaaattgctggtatctttttaacacatggtcatgctgattcaatcggcgctttaccttatatcttacgagactatgatattccagtctttggttcaaaattaacgatcgaattagctaagattgctgttcaacgtgaaaatagacgtcgtaaaaatgacttattccatgttattgatgcggatacagaaattgaatttaagaatgcaaatgtatctttctttaagactactcactcaattccagattctttagggattgatatttctactaaagaaggagaaattgtttacactggggactttaagtttgatccatctgcaaaagaaggtttcagaactgattttgttcgcttgtctgaaattgcacaaaaaggtgttttagcactacttagtgattcaactaacgctgaagcaaacttcccaaatgatcgtcaaactagtattgaaaagtatatttttaatatatttgaaaattacgagggtcgtattatcgcagcagccaaagcatcaaatattgtccgtgttcaagaaatttttcaagcagcagcagctactggaagacacgttttcttaactggtagagatgcaggtaagattgtctacactgcaatgaaattaggctacttaaatgttcctaagggcttattagttcacagtaaggatttaaagaagattcctgataaagaattggtgatcttagaaacaggtcggatgggtgaaccgcttaagtcacttcagaagatggcaactaaccgccaccgcatgattaaaattaagaagggcgacttggtatttattgctactaccccttctcactcagttgaaacgatggttgctcagacaagcgacatgatttatcgtgcaggtggtactgttaaagagctgggccgagataagcatactagtggacatgcaactggtcgtgatttgcaattattaattgacacactaaaacctaagtttttaattccagttatcggtgaatatcgtttgcttgaaattcataaagatttagcaattgaagctggaatgaataaaaaagatattttcttaccacataatggggatgcctacgctttagaaaaaggccgtttctatcgtacagatgctgtcccaggtgaagatattatgattgatggctctggtgtcggagatgttggtaatattgttttaagagaccgtgaagttttatctgatgatggtgtctttattgctgctgttactattgatagaaagaaaaagaagatcatttcagaaccacgtgtttcaactagaggttttgtttacattaaagctaaccatgctttgatgaatggtgcttctgacgtaatcaaagaagcagttaacaacaactttgaacacaagaagtttgactggactgaattaaaacaagatgtccgtaatgatgttgaaaagtatctttacaagcaaacgggacgccgtccagttgttctaccagtcgtaatggaagttaaccaaaacagacaccgtgcaatggctagacgaaataaccaagaaaacaattcagaaaagcgtcaaaatagaagaaattatcataagaaagattcagaacaaaagaaggcaaaagcataatgacacatgcaagcaaagataattttcttcttttagcaaaggaagctaaagaacataatgacttgccgcaagctaagcaatatttacttgaagctttgcgtttaggccatgattcagatattgtttgtgaactatgtgaaatatacttaagccaagagaagggagatcaggcatattctctaattaaagaggagcctgaccttttttctaataagaaggtttacaatacctatcttaagattttaaagtttcagcattatgcaattgaagcagaccaattagagtacttacttgataaaaagttgccaatcaaggttgagccagttagccaaattaagcagttagaaataatgcgaaattttaaaaagctaaagtatattcaggaaagagactatttactcttatattgtttaagtgtagaaaattttactaatctcgcaaaaagtattttaatagatccatctcctaattttgcattacgtctttcattatgcgaagacttggtaaagcttggagatagcgaaaaaattcaagtttatattttaggagaagcaaaagaatttattcctaaggaaacagacttacttgagaaaagtccaatttatcgagaagtttgcgtaagcctggctgattattttaggcaagatccaagtaaattgcctttaatgattggcgagatgaatgtttgtttagggatgctttatccgcgtttaagagattacattaaagatccagatcaatttgctcatgattttagaaaataccttgaaaaaaaggagggcggagcaaatcagaaactgttaaataaaatatatgaatatttggcatatgaaaaagcaacaaattctgatttttagtccccatattgagcaaaaaaggtttacattttctgtggatctagtataatcaataaaggatattttcaaaggggtacgagctaggcttttacctttgaaagtagtataataatcaacagagaattatccgttacttactcaacggacttcttgcaaatttacaggagggtcatattaatggcagaaaaagaacattacgaaagaactaagccgcacgttaacattggtactatcggccacgttgaccatggtaagaccactttaactgcagctattactactgttttggcagaagacggtttggcacaagctgaagattactcacaaatcgatgctgctccagaagaaaaggaacgtggtattactattaataccgctcacgtagaatacgaaactaagaatcgtcactacgctcacatggatgctccaggccacgctgactacatcaagaacatgattactggtgctgcacaaatggatggtgctatcttagttgttgctgcaactgatggtcctatgccacaaactcgtgaacacatcttacttgctcgtcaagttggtgttaagtacatcgttgtattcttaaacaaggttgacttagttgacgatccagaattgatcgacttggttgaaatggaagtacgtgacttgttaactgaatacgattaccctggtgacgatgttcctgttatccgtggttcagctttgaaggcacttcaaggtgacccagaacaacaagacgttatcagaaaattaatggaaactgttgacgaatacatcccaactccagaacgtgatactgacaagccattcttaatgccagttgaagacgtatttactatcactggtcgtggtactgttgcttctggtcgtattgaccgtggtactgttaaagtcggtgacgaagttgaaatcgttggtttaactgacaaggttgaaaaatcaactgttactggtttggaaatgttccacaagactcttgatcttggtgaagccggcgataacgttggtgtattgcttcgtggtattgaccgtgaccaagttgaacgtggtcaagttttagctgcacctggttcaatccaaacccacaagaagttcaagggtcaagtttatatcttgaacaaagatgaaggtggtcgtcacactccattcttctcagattaccgtccacaattctacttccacactactgatgtaactggtaagattgaattgccagaaggtaccgaaatggttatgcctggtgataacgttgaattcactgttgaattgatcaagccagttgccattgaaaagggtactaagtttactatccgtgaaggtggtaagactgttggtgctggtcaagttactgaaattcttgactaattccaatctatctaaaaaagatgtatcttcggatacatcttttttttatccaaaattttaaaatcttctccctatatttgtgttttagcagcgtttagggtaagatagttaagtgtgcaatagcaaacccaaatttgacatcggaggtatttaattaatgtctgtaaaatgggaaaagaccggtaaaacatccggtgaattaacttttgaaatctcacaagaagaagtaaaaaaaggcttagatcaagctttcaaacgtgttaagaagaacttgcgtgtacctggtttccgtaagggccacgtttctcgtgttgtttttgaccaattttatggtgaagaagctctttacgaagatgctttaaacattgttttaccagaagcttacgctgctgcagttaaagaagctggtattgatccagttggccaaccacaaatcactcctgtttcaatggataaaaacaagccttgggaaatgaaggctactgtttctgttaagccagaagttaaattaggtgactacaagggtatcgaagttcctaaacaaagtactcgcgttttagttaaagacgtagatgcagagttaaacaagcgtcgtgaacaaaatgctgaattagtattgaaagacggtaaagctgctaagggcgatactgttactattgactacactggtactattgatggtaagccatttgatggtggtagtgctcaaaactattcattagaattaggttcaggtactttcattcctggttttgaagatcaacttattggtcacaaagctggcgatgatgtagacgttgttgtaaccttcccagaagattacggtgcaaaagacttagctggtaaagaagcacactttgctactaagattcatgaagtgaaatctaaggaattacctaagttagatgacgagtttgctaaagacgttgatgattcagtagaatcacttgatgaattaaaagataagatcaagaaggacttaaagaagcacaaggaagaagacgcaaaagacgctatccaagatgctgcaatcaagggtgcagttgaaaatgcaaccattgatgaagttcctcaagcaatgatcgatgaagacgttcaaaaccaattgaaccaatacttaggcaacatgcaacgtcaaggtattgacccacaaacttacttcaagttgactggtactactgaagcacaattgcgtgaacaattggctaagggtgctgcagaacgtgttaagactaaccttgttttagaagcaattgttgctaaagaaaaacttgatgcaagtgctgatgaaattaaacaagaaatcaaagacttagcacacgactacaacatggatgaaaaagttgttcgtcgtagcttgagtgatgacatgcttaagcatgatattgctattagaaaagcaattgatttagttgctgataaagcaaagcaagttgctaagaaagctactaagaaatcaactgctaagaagtcaaccaaagaagacgaaaaaaaggctgataagtaatagttgataactagttaaagaaaaggcggctatgacagtcgcttttttctttactatcaattaataagacaattttctttactctgtcaaagtgaactgctaagcttattttgacataaagtaagtgaaaaggaggaaggctcatggctaatgaaattactgaacaagaagaagtaaaatgttctttttgcggtaaaccacagtcacaagttaaaaaaattatggctggaaatggagtctacatttgtaatgaatgtattgatctttccaaaaaaattattgatgatgaattaaaagcagattctatcaaagaaactaaagatctacctaagccaatggaaattaaaaagcaactagatgagtacgtaattggccaagatcgtgccaagaaggtcctatcggttgccgtttataatcactataaacgtattagtcaaatggatatcgatagttctggaactgaattgcaaaagtcaaatattgctttgattggaccaactggttctggtaagacgtatttagctcaaactttggctaagattttaaatgttccatttgctattgcagatgccacaacattaactgaagctggttatgttggtgaagatgtagaaaacatcttgcttaaattattgcagaatgctgactatgatttagagcgagcacaacgcggaattatttacattgacgaaattgataagatttctaaaaaagcagaaaatgtttcaattacgcgtgatgtttccggtgaaggtgttcagcaatctcttcttaagatcttagaaggaaccattgcttctgttccaccgcaaggcggacgtaagcatccacaacagcagatgattaagattgatactactaatatcttattcattgttggtggtgcctttgatggtattgaaaatattgttaagaatcgtcttggtaagaagacgatcggttttggtgcagaaaacggtcttaatcaagtagatgctgatgattggcaaaagaatcttacgactggcgacttagttaaatttggtttaattcctgaattcattggtcgtattccaattatcactacacttgataagttgagtaccaaagacttgatcagaattttgactgaaccaaagaatgccctagtaaagcaatataagaaattgctgtctcttgataatgttgatcttgaatttactgagggtgcacttaaggcaatcgctgatatggcaattagtcgtcatatgggtgcacgtggattacgctcaatcgttgaaaattcattgatggacgtgatgtatcgcacgccaagcgaagataatattgaaaaggtagaaattaccaaggatgttattactaagcatgcgcagcctaagattacttataaagaaaatgagtctcaagaagcaagtgaggcagctaaataatgaaagtcgtagatacagaatttgtaattagtgctgtttctgaaaaacaatatcctaaggatgatttgccagagtttgctctagctggacgttcaaatgttggcaagtcgagcttgattaatacaattgttaatcggcgtaaacttgctcgtacttctcaacaaccaggtaaaacccagacacttaatttttataaagtaaataatgaattatatttggttgacgtaccaggttatggttatgctaaagtttccaaaaagcaaagagctgcttttggtgaaatgattcaggattatcttgaaactcgtgctgatttgaagggactcattcttttagttgacgcgcgtcacgatccaactgcggatgatattaatatgtttaattatgcactctatcttgatattccaattttagtggtagcaactaagatggataagcttaagaagatggaagcaagtcaaattaagcaaaagattggtaagagcttagacttaaaacaagagaatgtatcttttttaccattctctagtgtttctaaattaaacgtcgataaattctgggactggatcgaggataaaatgtaatttaaaaaattgcataatttaatgattaaatccgtctaactttgttataataaaagacgttgaaaatattggactaataatatttcaacaacctttgaaaaaagaaaaataccggttggagctgacaggctctaatcggtattttttcttgcttaaataaatgagttagctttagaattgaaatatacactttaaagaaataagggagaaaaatgactaagaaaatcttgtttgtttgtcatggtaatatttgtcgttcaccaatggctgaatttattactaagaaaattgtcaaagatctgggaaaagaaaatgaatatgaaattgcgtctgctgctacaacagaagatgcaatcattggaggagttggacacgatattgatgtgcgttcgcaaagagtgatgaatgaacacgatattccttttaatcatcgacatgctagaaaaatggttaagagcgactatggtaaatatgattacattgttggtatggatgaagaaaacttttttgacatgaatcacatttcggcaggagatccagaaagaaaagaatataaactcttatcttttactggctcaatgatggatgtagatgatccttggtatacaggtgactttgaggtagcatatcaagatatttaccgtggctgtgaggctttgattaataagattgagaagttagacaaataatgcaagttttaccaatctttttaattatattagcggtagtaattgcgggctatatttttacttctaaaaatcgcttttacttcttaaaggcaattattctatttttggcattattaatttttagtaccattaactttttaatctttttcggcgttgcagctctatttattaatcgaatccacgatatgaagctgggtaacctgttcttgctagtcattctttcaggtctttttctctatgaaggattgaaaaaattcaataagttccatcaaatttcagagatcacattaacgttaattgaatattgcattcagtggtcgctgatttatgttacggtctaccaatcgatttttaataatattgctaaaattcatactattactaaaatgatcaaaactgtccgtattttaaatcccgatcttttagtagtgattgtcttaccatcatttatttcaatttggattgcggttgttcttttgaaaaaatatcaacatgatttgtaaaagatagtcttatggatggaaaattggcagaggggtgtactgactaagtttcttctattaaagtgtaatttcttcaaagtggaattacactttttctataagcttaaatagctccaaagatcaaaattaaatggtaggataataatgaaagaaaaggagaaacatctatgaaaaaaatattactaatgagtgtcgtagcgcttagcttaattggggttagtgcatgctcaaatagttcaaattcgactagtaataatagtacaaaaagttcaaaaactgtcccaaagaagcattgggacaaaaagaaagatcaaaaacttgctaaagaaatggataaatatggtaataacaagaagcaaacttacaccaagtatgatggtaagaataagctgactactgcaagccgcatttatccggatgcctttaaaaaagatacctttaagctaaatggtaaaaagattagcattggctggagtcctcaaggcgagcatcattatgactatgatgtaatggctatttataaccatgatttgactaaaaatggtcaacataaaacttttcttttctgctggcacaagcaaaagccgattgtcctagtggatgaatcaagtaaaggtaatgttgttaacttacatgtcagccaagataagtcattaaatggcagtttttcaaacattatgaatggtgaaaatatctagtcgaaggtctgcatctggcagactttttgtttctaaaaataaatatccgtataatagatgacaagtgagatgattggaataggtagggaataaaaatgttaagtaagagaatgagagaattgctcgatatggtgtatgaaacgccgaatacaattgatctagccatagttgtacagacgcctaatttcgaagaaacgttcattagtgataatttgaggcgttcttatcagccagcaagagctgaaggattaatttttaggttgattggtacttttgttcagaaacttgatttagattatcatgaattcattgatgtcttaaagggcgacttggtagatgacctatttgatgtagacgccatgagaaagttaaagcgacctagtcagcaactttctgatgataaacttaagaaagcagaaaagcgcgttgaagatgtagttgattttgcagaagaattagtcagtgaaggagcaattggcgattacgtgctagtagttaactacactgaccagttaggcgacgtttttttccatgatactagtgatcagaatatgtcgacctatcatgatatccaggtcatgttgatggaatatgctaagcgcgagcttcttaatccagttgctgccataaaggacttagaggaaaagcgaccagctccagctaaattacttaataagtctgcttttgaagatcgagaaattaatggctttaagatagaagatttttggcaaatttaccgtgttccttatcaaggtggtcagtttgatttagaaattccagaaggtttgcgctttgaaaaagaattaattaaatatagtaagaacttgcagcgtttagatttaacgtatttcctcttatttgttagaactgaccgctatgtttatgtagttacgcctgcttttaagactgaggatgacttgctagaggctttagcaggatatttgactaccatagaagttaacatggattttactgatgaaaaatttaaagagatcagtgatatgatgcttgaagaaaagtcttacttaggtttagtccacggcggggatgtcgcttatgcaattgatttgccagtaaaacgtgaagtaactgatgggcaagaaattcgtcagcaaattaatgacgtttttagtgatctattgacttatcaaaagctaggcacggtccgtgacttttatttatttgcaaatgttaaagaaaataacttcactggcgggatgatgaaagagagcaacttaactagttacttattgaatttcgttgaattattagcatatttaactcatatgtatccaaatctagcaccaaagaagattattgacttagttgcgactaaagaagaattaaaacgcaagcggaaatagttgctttctttgctcaaagtttctattgtagaagtgagagtgtaattaagagaaagaagagttgaaaatgagaatttccatttggggcgattacgcatgtccatactgctacattggtgaaacttacttacaaaaagcaattaaggaattaggtgttgaagacaagattgagtatgaccttaatgcattccaaatcgacttagatgcacctaaatcaactaataataccaatgctgctcttttagcttatgaaaaggcgatgccattaagtaaagctaatgcagcttatgatcacgctaaggtgctgggtaaagaagcaggtttgacaattaatgaagcaaccgcttataacactaatacgatggatgctcatcgaatggttcaatgggctaaggctacttatcatgattctaagttaaccgcaagtttagctgatgatttgttctatgcttactttactgaaaataaggaattagcagatcacgaagtactacttgagattgcaaagaagaatagtttagatttgaatgaagtaaagaagttattagaatcaaatgattatcaagatgtagttatgcaggaagaagcagacttgcaaagtcgcggtattcaatcgattccgtactttattatcgctggtcagcaatttgatggtgttcaagatgtttcaacctttaagacagcaattggagctgccttagggatgaagccgggagaatttttaaacttttagaagttattttaagatcctattggtcatgacgtaatgaatgaacttgctaagcgtggttatgaaggcgtaggttctgatttagcacctgaatatgctggtgttgctgacggaagcagcgttaccaaggcaccttatgtttctttagatattactgatgcagaagctgtagacagggttatttctgaagttaatcctgatgttattgttcactgtgctgcttggactgcagttgatatggccgaagatgacgacaaggttgcagctgttcgcaaggttaacgttgacggaactcagaatattgctaatgttgctaagaaactagatgcaccaatggtttacttgtcaactgactatgtctttgatggtcaaggaactactccttgggaaccagactttaagggttataagcctttgaatgtttatggtcaaaccaagcttggcggaaaagaagctgtttcaaacactttagataagtacttcattgttagaattgcttgggtatttggtgtaaatggctcaaactttatcaagactatgcttaaggttggttcaaatcacgatgaagttaaagttgttagtgatcaaattggtaccccaacttatacttttgacttagcacgtcttttggtagacatgattgagactgataagtatggctactaccacgcaactaatgcagaactaccagcaactgaaagtggctacgacgaaaatggtactaagactggttacatttcttggtacgatttcactaaagaaatttatcgtcaagctggctacaagacaaaagttactcctgtaactactgaagaatatggcttatctaaggcagttcgtccatttaactctcgtttagacaagagtaagttagaagaaaatggcttcaagccacttccaacttggaccgatgctattagccgttacttagatatcttaaaagatgacggtttcttcgacgaattgaagaaatagactaattgaataataccgaataaaaggatcaagcgtaggcttggtcttttttgtgttggggcgatatgcattaaaagctagacaataagtagcatatttggtatgattgttttgaaaagtcaatcccttcgtttcgctttttgcgcaggtacgtcctgaagaacgaaggttttttttggagaattttatgcaatccccacattacttaactcatttttctggtcctccaattatttttttgttttagatggttgttagatcaataaagtttaatttgtggtgagttacgttaattagtcgtaattacactactggtccattgtttttcaatgggcctttttattatattccgaatcgtttttcacctctttagtgaaaaagtgtattttaaatgtaagtgctgtttaataccatataagtgtcaagagaaataatattaatggagaatttaaaaacaactaagaatgatattgcatcatcaaatttaatggctactaacatgagaaaagcagcaaagagggctggattagattacaaaattcaagctcgaggtggagtaaaattaggtgacaatgtagatcaaattgctgtcttaatgttgagttcttcatttaaagacagaatttggtgtgattaaattacaagtacctgacaaggtaaaagtaattttaatgaaactagattactattcaatttccatttaattttatggattacatgaaattagataagcaaaggatcatcgcggatcttttcctcagggcgcggtatgtttatctcattcatctcccagtattattacaatacaactattttaattagaaagatttaaagatatttcacccaaagataaaattcatgattctgttgaataaatgatttaaaaaatttatagtaagcataggattagaaagtatttaatcgatatgatttttatataaaagaggaggtcgaccagacaatgagtatttatagaaatgatgatgttttaatcacagatttaatggatagaattgataagttagaaaatcaggttactgatttgaaaaaaatctattataaacaatcaggagaaagtcacagcacatttttatatggttgtgaagtgcgtggttctgattatttacatcttgaatataaggtagttcctcgtctaaaagagaatgatcccgttctattaatacgtgaagctgataataaatacgataaaaatgcgatttctgtagctacgccggctggactaaaattaggttatattccacgtgaacataatttaatttttagtcgtttgattgactctggtaatcttttatttggtcgagtaaaaaacttccattgggatggtaaaaacttggagttgataatcaaagtttacttggcaaattagaataaggtaggcaaaataacgcataaagaaaaaatgaatcgttattatgcattaattgctgttgcaattttattagaaacctttattaaggttttaggtaattaaactcatcgatttttagcataatagttggagtaggaaatgctatataaacaaatagaacaaaataagcggaatacatggatcattttgggattgtatactgctttattacttgtattaagtatttttcttggaatgatttttacaagatatgttgggattggattttttatcattggtttgatctatattgcacacgtatattttgatgccacgcagcatttaatgaaagttacgaatgcggttgagattactaaagaaagcgaacctgaaatatacgagcttgttgaagagctctgtctagcaggaggcttaccggttcctaaaatttacattactcctgatctagatccgaatgcttttgcaacgggacgcgatcctgaacatgcaagtttagctcttacgcaagggctgttgagcatgatgaataagaaagaagtgcaaggcgttatcggacatgaactttctcatattagaaattatgatacacgcattacagttcttgcgagtgctttgactagtttaattaccatcactgggattggaattgtattatttagctggggtgtattgactagtgagagtaaaggatggctaggattgattattaaattctttgctatgtttttaattatagttggtgggattatttctattattggtattccattagctaagttattgtttttactagtttcgcgtcaaagagaatatttggccgatataggttcggttgatttaacacgtgaaccaagtggattgatttcagctttatctaagcttgaaaaaaaggaagaaagtgaatcaacaccagaaattagttcacaagatttagctttagagcatttatactttaacttaccacatccaggtaattggattgatcgactattttctgatcatccaccgctagataagaggatagaacggttgaagaatagcgataagattgagtagaagagaggaccagcatcattttttgatgttggatctttttgttttattgctgattgatcaaaattaattaaaaatgctattatttgaattaatgatgtctgataaatcaaggatcttttagtgtgttctctacgagtgtggaggactcctgatagacaaatatatcagcttttaggctaaagtaagaatttagtaggtataaaaaatgaaagttagatatgctggtgaaagtttttatagtgggttaggtttaacaaatggcaaggtatatgtagttgataaaaaaggacctttttatagaataatcgatgatagtggagaagattatttgtattcgaagactaatcctgctccactagatggtagttcaaaaggtgggtattggaatatagttgagtattgaaagagcataataaaaacgcactcataagcctaatttaagcctatcagtgcgttattttgtgtaattctaaatattcttaacaaattcagcgattctctttaatgcttcttttaattgctcagttgaagaagcgtatgacattcttacgtagccttggccaccttgaccgaagtagcgaccaggagttacaccaacttttgccttggtagctaattcatttgcaaatgcttcatcatcagtaccaaaagcatctggaattttagcaaaaatatagaaagctccttgtggggtagacatttcaaagcctaatttttctaatccggctttcatgaatttgagtcgatcctcgtaaatttttctagattcaagcgggtcagcttgaccgttgtttaacgcttcaattgctgctgcttgtacattatcggtaactgaagtgactaaaaaggcattaactttttgaattgttttcataatatctgcgggagcagcgatatatcctaatctccatcccgtcattgcgtaggcttttgacaggccggaaattaaaatgtttctttcgggaatatattgtgatagagaatgatggacattattgtcataaactaattctccataaatttcgtcagttacagaaaataaatgatatttagtaataatttctgccagtgcctttaaagtttcttctggatatactcgcccagtagggtttgatggatcagttaaaataattgctttagcaccttttccttcattttgtaaaactttttcaaggtgttcgggagtgagaataaagccatcttttgaggtatccatttgaactgggatagcaccagttaatttaatcaattggaagtaaagtgcccaaacaggagtagggactaaaattttatctcccggatttaagattgacatgaatacatcatttaaggcacctgtagcaccaacagttacacaaatttctgttgctggatcatattttatattaaggctacggttaagatatttgctaattgcgtcttgcaattctggtttaccggcttgtggggcataatgagaatcatttgctttaatatcagcaattgctgcgtctttaacatgatctggtgtatttaaatctggctcaccaattgttaatttaataattccaggaatttgagaggcctttgcatcaaaagctctgatttttgaaggtcctaaagaatttagtcgtgtattttttgtaagtgataagtcatttgctaattttggcatagtattaaatccctccgctaatattatagattattgtatagaaacaaaaatcatgaaacaacaattttctattaaaatttgatatgtttaaaaaagaaggtgagaaaatgtttaataaagaagaagcacttaaaaaattaaactcagagcaatatgaagttactcaacatgctgcgactgaatatccttttactggaaagtatgacaaatttaatcaaaagggaatttatgttgatgtggtatctggggagcccttattttctagtgaagataagtatgatgctggttgtggttggccgagttttacgaaaccaattgaaaaacttgtttatcatcgggatcaatcgcatggaatggaacgaactgaagtaaaaagtccgctagctgactctcatttagggcatgtttttacagatggtcccgttgatcaaggcggcttgagatattgtattaattctgctgcgttaaagttcattccatatgataagctagaggaggaaggttatgaaaattatcagaagttattcaaaggacgatagaaaatgaattttgaagaagaactttataatttagatgtacctgaagaacatattcccgagttattgaaatttggtaaggataatcctgaatttttaacaaaggcaattaaagcagaaggaaatgctaaaaaatatagtgttgctcaaactaagatggaacccagtgatttgattaataatcagattgcttttttgggtagttcagtgacctatggtgctggtgctttaggtgaatcttttgttgattatttaagtaaaaaagataatatttgtgcttttgaggatgccgtttcggggacgacattagttgataatgactctaattcatatattggaagaatcggaagattgccagttttagaaaaattaacagcatttgtcttgcaactttcaactaatgatgcaattaaaggaaaagaagatctaggcgaaattgcacaagatgataattttgacaagcagacagtaacgggtgcaattgaatatattttaaattatgtaaagaaaaactggaattgtcctgtgttgatttttagtaatccaaaatttgattcagaattctatggtcaaatggttgagagagttaaggaattacaaaataagtggaattttgatttccttaatttgtgggatgatgatgcttttaactataatgaaaaagacagagaactttatatgcttgatccgatccacccaacgcgtgcagggtataagttaagttggttgcctgtaattgaagaagagttattaaagataaaaaaatagtaaaaatcaaataaatactttaagctaaatagtgaattgattatgaactaaataattggttcgctattttttgatataaagctatagtgaaaaaatagtggaaataattcagaattattcaaaattagaaagaagtactaataaaatggaagtagctaaaccccttgataatactaaagaatcgcactatgacacagctatctttgctggcggatgtttctggtgcatggttgagccttttgacacttatccaggcattgtcagtgttgtttctggctatactggcggtcatgttgaaaatcctagctatgaagaagtctgtactgggacaacaggtcatgttgaggctgtagagataacattcgatcccaaaattatttcgtataagaaactagttgatatttattggcaagtgactgatccaacagatgcaatgggacaatttcaagatcgtggtagtcaatatcaaccgataattttttataattctccacaacaaaaagaaattgccgaagaatctaaaatgcagcttgaagattcacacaggtttgatgagccaatcgtaaccaaaattgaacctgctgaacctttttatccagcagaagattatcatcaagatttctataaaaaggatccattacgttatcaaattgaagaggccggaggaagggctcaatttattgaaaagcactggaaaaaataatagtcaaataggcactagaattatctttcttttttgataatgattgttagaatagatagtgcaaaagattatttgatataaaaaaggaaaatcaagatgagtcaattagaaaagctgtctcgtagacactatctaatttcaaaattatctgcggcattcctctatgctttggcggttgctgtggccctgaactttttctggggtcctggtaagatctacgcctctggtattacgggatttgcacagattattcaatcagtgtctgaacgattcatgccatttaccttatcgacctcagtgatgtactttgttttaaacattccgctttttatcttgggatggtgtaaaataggacatcgctttacaatttttaccattattgccgtattacttggatcaatcatgatgcgagtaattgctccgattaagattacttatgatccaatcatttgtgccttatttggtggcgtaattaatggggtcggaacgggaattgccttgaaatcaggaatttctacaggtggtttagatgttctaggcattattttaagaaaaaagactggcaagagtttcggccaaattaatattttctttaatttaatcattgttatctgtgctggttttgtatttggctggacgagagctttatatactgctttaaacatttttgttaatggtagagtaattgacgctgtttatacgcagcatcaaaaaatgcaggtctttatcgttactgaacacccgaaacatattattgaaggtattcagcgcaagatgcaccgaggtattacgatctttcatgatgttgaaggtgcgtatagtcatacggaaaagaccgtcttaatgacaatcattgatcgttacgatatgttcgatatttataatattgttattcaatctgatccttatgcatttatgagtgtaagtgaagttgataaagtatacggacgcttcaaggagcagaaaccagtttaatagtataagaaaaaaggcttaatctacatgagttagttgtagattaagccttttgaaatacattcataaaactaattatttcgcatagtcatcgatgccgaggtgttccataattaaagcagctgtctcttcaattgaacgatgagcaacattaattacgtaacaaccaagtttcttataaagcttattagcagcgtcaagttcggcattgatagaatccatatttgagtaagtcgtatcaggattcaagccgtaagcaatcattctttgacgtctaatttcatttaagacggatgggtcattagtcaaaccgataatctttttaggatcaactttataaatttcatctggaatatgagtttgaggaacaagaggtaagttagctactttcaaattcttgtttgctaagaacaatgaaagaggggtctttgaagttcttgaaactccaagcaaaacaacgtctgcttctaagaaacctttaggatcttttccatcatcatacattacggcaaattccattgcggaaattctgtcgaaatagttttgtcccatgtggtgaacagcaccaatttcgtgttttggttcttcgccagttaaagaatgaatattttcaattacaccagaaagaaggtctacatacttcatattatgttcacgtgcaaatttaattgcggctaattgttcatcttcgtgaattagcgtaaatgcgattaatacattttcaaattctgtgatttcgttgaaaactttctctagtttttcacgattagtaataaatggatagcgacggtaattaaatttcacgtctggatattgaacagcaccggcttgaaccatgttaaaggcagtatccccgacagagtcagagataataattaagttaacgattttttgattttctttcttttcttcagtcatatatttcacctcattgtttacctaattataccaaaataagtgagaaaaatgttaatcgactattgaccgacttttctcgtttagctataatttaactatattgttgtggcacatatttgtgtgccaagaaatggaaggagggatctcacatggctaagacaatcgttcacgaaaacgagtctattgatgatgctcttcgtcgtttcaaacgttccgtttctagaagtggtaccttgcaagaataccgcaagcgtgaattctacgaaaaaccaagcgttaagagaaagttaaaatccgaagctgctcgtaagcgtagacattattaatataaaaaagctcttgatagaaattcgctctatcaagagctttttttgtttaaaaagtttagaatagactttgtaagttttgattaaagaggagaaaaataaatgtcactaaatgatactttaatgcaagatatgaaagcagctatgaaggctaaagataaggaagctttaacaactattcgttcactcaaggctgcagtaatgaattataaaattaaagtgggacatgacttaactagtgatgacgaattaacagtcttgtctagtgcgcttaagcaacgtaaggaatctttagaagaattttcaaaggcaggcagagatgatttaattgatcaaactaaaaaagaaatgcaattaattgaaaaatatatgccaaaacaaatgtctaaagaagaacttgaacaaacagttgaagagacaattaaagaagtcggtgcaagttctaagaaagactttggtaaagttatgcaagctttaatgccaaaaattaaaggtaaggctgatggtaaagccgcttcttcaattgttggtaagaagcttaactaatcgcttgatataatggaggatcaattttaagtgggacaaactgtagaagcaacatttacaccaactaaacctgaaacaattatgaacttagttggaattaacgatgcaaatttgcgtttaattgaagaatcttacgatgtgcaagttactgatactggtagtgagattgaagtaactggggaagaaagccttgttaagaaaattatgcaaatttttactgctttagataaggttgttacccgaggagttactattaccgcaactgatgtcgtaagtgcaattaaaatggccgacaaaggaactttggagttctttggtgagttatacaataagattttaattagggatgctaagggtcgccctgttcgagttaagaatatgggacaaaagcgctatattgaagctattcaaaaatatgacgttgtttttggaattggacctgctggtacagggaaaacctttttagcagtagttatggcaattgcggcctttaagaaaggtgaagtatcacgcataattctaaccagaccagctgttgaagcgggagaatcactgggatttttacctggagatttaaaggaaaaagttgccccatatttaagaccaatttacgattctttatatgcaattttaggagttgaaacaactaatcgcttgatggagcgaggagtaatcgaagttgcaccgcttgcttatatgcgtggtagaactttagatgatgcttttgtaattcttgatgaagcacaaaatactactcaagctcaaatgaagatgtttttaactagattaggttttaattctaagatggttgttaatggcgaccagactcaaattgacttaccaggaaaggcaaagagtggattattgcaagccgaacatatacttgcaaatattgaacaagtaaaattcattaactttactttcaatgatgttgttcgtcacccagtagtagccaaaattgttagagcttatgaaaaagaaggacactaaaatttgaataacttagatatttctttcaatgatgaggttaatttcttaaaaaatgatgataaagactggattccttggattaccaatctgcttttgtctgccaaaaaagaaattaataagaagaatgctcaagaaatgagtattaattttgtttcctccgaaaaaattcacgaaatcaataaaaaatatcgtggaaaagatcgaccaaccgatgtaatttcctttgcaatagaagatggattagacgaagactttatggctgcctttaatgatgatcctgattttgttgaagatattggagatctattcctttgtccagaggtaataaaaagacatagtgtcgagtatgaaactggatttaaccgtgagtttggatatacactagttcatggatatttgcatttaaatggctttgatcatattgaagatgatgaagctaaagtaatgtttggtatccaaggcaaagttttacgtgaatatggacttccgcttcatccagatcaggaaaatcacggaaagcaaattcactaagacttaaataaaggatgtaacaatgatggatgaaaaaaaagactataaatcaggctttgtagctttaattggtagaccaaatgttggtaagtcgacacttttgaactttttggtaggtcaaaaagtagcgattatgtcaccacaaccacaaacgacaagaaacaaaatatctggtatttatactgatgatcaggagcaaattgtttttattgacactcctggaattcacaagcctaagaataagttagatgactttatggataagtcgagctattcggctttggacgaagtcgacgttgttttatttatggttgaaccagaaccagcaggcaagggagaccaatatattgccgaacttcttaagaaaattaaaaaacctgtatttttagtgataaataagattgataaagtccacccagataagttattatctattatagattcgtacaagaatctaggcgattttgctgaaattgttccaatttctgcttctcagggaaacaatgtttccgagctgattaaaacaattgccaagaatctgccagaaggtccgcaattttatgatgcagaccaattgactgatcgtccagaatattttattgtggctgaattaattcgcgagcaagttttgaagctcactcatgaagaagtcccacatgcaacggccgtggtagttgaccgaatgcgggatcatgaaggtggtaagcttcaaattgaggctacaatttatgttgaacgtccgggtcaaaagggcattataattggtaaaaaaggtcaaatgttgaagcagattggaattgctgcacgtcaagaaattgaagctttattaggcgaaaaagttaatttgcgtctatgggttaaggttcaaaagaattggcgttctgatcctgcctttcttaaatctattggttacaatgccaaggaattaagatagatggtacgtgaactttgtgaggttcaaggattaatttttaaaagaaaaaaatataaagaggctgatattctaaccaagatcatgactaaagatcatggtatttttacaatagatgttagaggagcactgagaccaaaatcccgattaggagctgcaacccttaacttctcttacggaaaatatattgtaaatacaaattggaaaggaatcagttcgctacggactttcaaggatgtaaagcagttagaccaattatatttagatttaactaagaatgcgtattcgagttatgttttagacttgcttgaccatgcttttgttgaatataaggacattggaagcttttatgatttgattatgaaagcgttgctgaagataaattctggggaagatgtggcagttattacccaaatggtgcaattgaagttgcttaatgcatatggagtagcaccgcaattagatcgttgtttaatttgcgggaaggtgcaaggtacatttgactattcattggaattaggtggaattatttgtagtgatcactttaatagtgtcagtcaaaggatgcatctagatcctaaagtagttgctttgatacggactctagctttaattgatattgatcgtttaggaaaagtgaaaattaatccgcaattaaaaaagaactctggcaaagtgattgatcggatgtacgctaactatttagatcttaacttgaaaactaaaaaatttcttgatgaattggcgcttttttagctgttgactttttatattcgtttaaagactagtaaggtttcttactagtctttttttgaaaaagatgatagaatataagcgtatcttgacaactataaaggaatagaaaagtaccaagacagcgagtgcagaatggtggaagtgcatttgggaaaaggcaccttttagtcaaagttgttaattaagggcaggaagaatattttcctgaattagggtggaaccgcgaagtaaatcgtccctatgcaatttttgcataggctttttttatgcctatgttgtgaggagagagatagatgtcagaaaaactgaatatccagaatatgatttttaaattggaacagttctgggcctctaaaggttgtatgattatgccttcatatgatgagcaaaaaggtgccgggacaatgagtccatatacatttttacgtgctgttgggccggaaccttgggcagcttgctatgttgaaccttcaagaagacccgctgatggtcgatatggtgataaccctaaccgtttataccaacaccatcaattccaagttgttattaagcctgcaccaaaagacattcaacaatattacttagatagtttaagagttttaggaatcgaacctcttgaacatgatattcgatttgttgaagacaactgggctaacccatctatgggttgtgccggtgttggttgggaagtatggcttgatggaatggaagtttctcaatttacttacttccaagttgttggcgagctcgatgtaaaaccaacaatgagtgagattacatatggtgttgagcgtcttgcttcttatattcaagatgtcaattcagtctttgatcttgaatggggcgatggcgttaagtatcgtgatattttcaagcaacctgaatatgaacattctaagtatgcatttgaagaaagcgaccaagagcagttacttaagttctttgatatttatgaagctactgctaaacgcttgttgattcaaaacttgattcacccagcttatgattacatcttaaaatgtagccatacatttaacttacttgatgcacgtggtgctgtttcagttactgagagagcaggttacttatcaagaattagaaacttggctcaccttgccgcaaaggggtttgttgaagaacgtgaaaaacgtggcttcccattattgaaacaccaagaagaaactaagaaagcggggcagaacaatgactaaagattatttatttgaaattggcactgaagaaatgccagctcacgttgtttctagaagtgttaagcaattagcggatcgtactaagaagtatcttaaggaaaatggtctttcttttaaggacattaagacttattcaactccacgtcgcttgactattttggttgaagacttagctgaaaaacaagatgatattgatgaagttaaaaaaggtcctgctaagaagatcgctcaagataaagacggcaattggacaaaagctgctcaaggttttgctcgtggtcaagggatgactactgatgatatttattttgaagagcttaaaggaactgaatatgcttatgttcatgttcaaaaagaaggtaaaaaagcttctgacattttaatgggcatgagcgatatcattaaagccatgactttcccaactaaaatgcgttgggacagcaatgattttgagtttgtacgtccaattcattggatggtttctttacttggtagtgaagttgtaccagttaagttacttgatgtagttgctggccgcaagactcaaggtcaccgttttttaggtgatagtgtggtacttgcaaatgcagatgactatgaagaagctttgaagagtcaatatgtaattgctgatgctgatgaacgtaagggcatgattcttaatcaaattcaagaactagttgctcaacataactggaaagtaaatattgataagggattacttgaagaagttactaacttagttgaatatccaactgtctttgctggttcttttgatgaaaagtatttgaatattccagatgaagttttaattacttcaatgaaagataatcaaagatactttgaagtttatgatgaaaacggcaagttgattaatcactttattgctgttagaaatggtaatagtgagtacttagataacgtaattgccggtaacgaaaaagttcttgttgcacgtttagatgacgctcaattcttctatgatgaagataaaaaatacccattagctcactttgttgacaagcttaagaatgtttccttccacgacaagattggctcagttgccgaacatatggcacgtgttcatattattggtgactaccttggtaagaaatttaatatttcagaaactgaaatgaaggattttgatcgagttagtgatatttacaaattcgatcttgttacttcaatggttggtgaatttgccgaattacaaggtgtaatgggaatgcattatgctcgcttaactggtgaagatgaaaatgttagtgtagcaattaaagaaagttacatgccaactagtgctgagggagatttgccaagtacaactgttggttcacttctttcaattgctgataagttagatacaattatttcattcttcggtgcaggcatgatcccttcatcatctaatgacccatatgctttaagaagaaatgcatatggaattgtaagaatcttattaaacgaaggttggtcacttcctgttaaagatgttttaccagaattaattcaattattgtctggcaaaactgcagctaaattacctaaggatgctgaagctgaaaatgaaattgctgactttatccgtgaccgtgtaaaacagcaattacaagttgaaaaatatgattacgacgttattgatgcagtccttgcatctagccagcaagatccaattcaaattttagcagcagctaagactttgcaaatgcatcatgacgatgctgactttaagccggtagttgaaagtttgactagaattactaacatcttgaagaaggccaaatatagaaatgctgctaaagttgatgaaagtcttttccaagatgtaagtgaagaagaattaaatgctggtgtaaatgcactagaagaaaatactgatttgagtattgccgatctatacaaaggctttgttgaattacaacctgtaattaacaattactttgaaagtaatatgattcttgataaagatgaaaaagtaaagaataatcgtttagcacaattattaaaggttaataacttggctgatcgaatgggtgacttgagtaaattagtaattaaataataattgattgggatgatccattgatggcaggacgtattcctgaacaatttatcgatgaagttcgcaattctgtcgatattgttgatgtaataagtcaatatgtttctttagaaaaaaaaggtaaagactatctaggactttgtcccttccaccaagaaaaaacaccatcttttactgttagtgaaggtaagcagttttttaagtgttttggatgtggcaaaggcggaaatgtatttaagtttttaatgtatcaggatcatcttacttttcctgaaagtgttaaaaaagcagctgaattggcgcatcttcaaatgccagaaggttacggagaagcggccaagccacttagtccattaaagaagatgtatcggcaagcaacagagttttaccaacatattttgttaaccactaaagttggtgaaagagcgctggaatacgccagaaagcgtgaattaaccgatgacttgctaaagcattttaaagtaggttatgctccagacgatgataagattttacttacttatttgcagcagaagaaagaatatactgataacgatctaagagaaagtggtctatttattgaatctcaagatggacaattatttgatcgttttcgtgatcgtttgatgtttccattaggcgatgaatctggctatacagttggtttttctggtcgaagaattagcaatgataaaactattgctaaatatatgaatagtccagaaactaagatttttaataaatctaaattactatttcattttgctgaagcaaaaaaagcagctagaagtgaaaaacatttgattctttatgaaggctacatggatgttattgccgcttataaagctggcattcaatcaggtgtagcttcaatgggaactagcttaacgaccgaacaagtttatatgctaagacgaattacacctaatatcttggttaactatgatggagatccacctggaattcatgctgccgaacgtgcaacgaaattatttggacaagttcaaggctttaatttaggaataattgttttaccagaaaatcttgatcctgatgaatatgtaaaaaaatatggaaaagaaaagtaccgtgcagaagttgcaggtgctcttagttcaacagattttctacttgaaagattagcaaatcagtataatttacataatgatcgagaaaaactaacttatataacagcagctgttcaaatgattgctggattaaatgatcctgtggctgctgacttatatcttgataaattggcgcgtcaaactggagtaacgcgtgaatctctaaaagtaacgttcgtacgtgagagacgaaagttacaaagagctagaaatcatcagcaagcttatcaagcatctacattaatggaaaatataggtgagacagcagagcctaaagaagctcaagcaggaactgatagtgaaactagaaatccagctttagatcgcttgctgtatctatttatacatagtgatgaagcaagagattatcttttaagtcgacagtttttattcccagatgagcgttatgcaaaattagcagaattttggctaaaatatcatcaaacccatgatgaagcagaagtgaagggctttattgattttattcctgaggaacttcaaggtataattattaatatggaaatgattacgatgcctcctgattattctaaacgtgagctagatgatcaattaagggcattggaaaagagcaagattgatgagcaattaaacgacttgcttaatcaattaaaggaagctcaaagaaaacaagataatagtttagagcttgaaatagcgcaaaaagtaattgcgttaagaagaaagaagttttagagggggcttttttacatggcagagagtaagactaccaaaaaagaagcaacaatgacacttgataagaaggtcaaggaagttgttaaggaagttaaaaaagataaacaaatcactgaaaaagaatttactgctcaactaattaagccatataatcttcaaggaaaagcggtagatcaacttgtacaagaatttgaagacaatggaattagtatcgttgatgaaaaaggcgaaccttctaaattagctttaaagaagcaaaaagatgttgaaaaagctgaattgaaagatatgtctgcaccttcaagcgtcagaatgaacgatccggtgcggatgtacttgaaggaaattggacgtgtttcattgttgaatgcggatcaagaaattgctttagctaagcgaattgaagcaggcgatgaagaagctaaacaagaattagcagaagctaacttacgtttagttgtttctattgctaagcgttatgttggtcgtggaatgtccttcttagacttaattcaagaaggtaacatgggcttaatgaaagctgttgacaagtttgattatcgtttaggattcaaattttcaacttatgcgacttggtggattagacaagcaattactcgtgcaattgctgaccaagctagaactatccgtatcccagtgcacatggttgaaacaatcaacaagttgattagaattcaaagacaacttttgcaagatttgggaagagaaccaactccggaagaaattggtgctgaaatggacatgccaactgataaggttcgtgaaatcttgaagattgcacaagaacctgtttctcttgaaactccaattggtgaagaagatgattctcacttaggtgactttatcgaagataaagatgcaactagtcctgaacaacatgcttcttatgaactattgaaggaacaacttgaagaagttcttgatactttaactgaccgtgaagaaaatgtgttgcgtttacgtttcggtctagatgatggacgtactcgtactcttgaagaagttggtaaggtatttggagtaactcgtgagcgtatcagacagatcgaagctaaagctttgcggaagttacgtcacccaagtcgttcaaaccaattaaaggatttcttagattaagatatttatataaagacaagccttgtagtataagttgctgcaaggcttgtttcttataaaaaatttttcaactaagttttagactatctatgctaaaatttttagtaagaggtgagagtgtgttagaagaaagactagctcaaattggtaaaatggtagatcctgaaagccgattggctgatattggtactgatcatgcatatttaccaattgcattagtaaaagaaggaaaaatagattttgcgattgcaagcgacgttgctgcaggtcctttgaataatgcaaaacaagatattgaagaagcaggtttagaagaaaaaattgaaacaagattgggctctggcttagcaactttaaggacagaagatcaaattgatactgtcgtgattgccggtatgggtggaaagctaatgactaatcttttagagacggcatatcaagaaggaaaagcatacccaacattaattttagaagctaatattggtgaacatttggttagaaaatggttgatggaccatcaatatgaaattgtagctgagcaaattattgaagtagctggtcatatttatgaaataattaaagctgtacaaggaaaaaataaagttgagctttctgaaaaagatttagtttttggcccatttttattaaaggaaaagaatcctgttttttttaaaaagtggactaatcaacttaagtactatcaaaatttaaaaaccaatttaaataaagctaaaaacaaagatgaggataagataaacaaaataaatgacttaattaaaatgattgaggaagtgttgaaatgacaaaagtggcagatattgtaaagcgtttaagagaagattttccagaagaaatcgcttctgaaggtgatccagttggaatgcaaattggatcgatggatgctgaagttactaaaatgatgactactttagatgttcgtccgcaggtagtagatgaagcaatcgaaaaaggcgttgatctgattattagtcaccatccggtaatgtttagaccagcaaagaatttagacttttctgatcctcaaaatgccatgtatggcaagctgattgcaaatggaattactgtgtactcaattcatactaattctgataaagctcaaaatggatcggcagattggcaagcagaagagctggggcttgaagatgttgaaccctttgccttagattcagatggaattgccattgggagaaaaggtagattacctaaagaaatgaccgctaaagactttgcatactatgtcaaagataagatgcacattaaaatggcacgtttgattaccgcagataatgataagatgatttcaacggttgctttcatttgcggtgatggcggtaagttttggcgtcaggccctagttgatggagttgatgcctttatcactggtgacgtttattatcatgtgggtcatgacatgatctcaagtggcttaactgtagttgatccgggtcactatactgaaaagctttttaagtataaggtcggggatcgtcttgaaaagtggaataaggattataattggaaggtacctgtagtagtctcagaggtatcaactaacccattccaagatttattttaggagaattaaaatgactgaatatccaaatttattacctagatttttaaaatacgttaaggtaaattctagatctgatgagcattcagaccgttttccatcaactgaaagagaagaaaactttcaaaagaatgtaattatgaaggacctagaagagttaggtcttaaagatgttcactataatcaaaaaagtggttgcgtaattgctactattccatcaaacattgactataaagtgccaacattcggcttgttagcacactgtgatacagcagactttaattcagttgatgtcaagccacaaattacagagaattatgatggtaagtctaaaattcaattaggagatagcgaattttacttagatcctgaagtctttccacatttaaaaaattataagggtcaaatgattatttcagcttctggtgatactttacttggtggggatgacaagtgtggtatttcagaacttatgacttttgcggaatacttgatggaacatcccgaagaaaaacacggtgaaattaaattagcttttactccagatgaagaaattggaactggagcagaacattttgatgttgaagaatttggagcagattttgcttatacagttgatggtgaagcaccaggaaaacttgactggggtacgttttcagcagctcaatttggcttagatattcaaggagtaaatgttcaccccgcagttgctaagggacaaatgatcaatgcaattcaggttggaattgattttcataatcaattgcctgaacatgatcgtccagaacacactgatggtcgagaagggtttttccatttaatgaattttgatggaaccgttgattcagcacatatggattatattattcgtgattttaaacgcgatggccttgaaagaagaaagaacttggttaaagacatcgttaagaaaatgaatgacgaatttggcactgagagaattaagcttaaaatgtgggaccaatactacaacatggctgatgaactcgaaaagcatatggagattgtggacttagctagagatgcttacaaggctgaggggcttactgttaatgaagatccagttcgcggtggtactgatggctcacaattaacttatatgggcttaccttgtccaaatctttttgccggtgaagagaatatgcatggtagatatgaatacaccgtccttgaatccatgtggaaagctgtggacgttttacgtaaaatcaatcaattgaatgttgaaagaaagaaataaaattagtgaaacaattttaactatttttgattaaatttattagttctaggttcttcttgatagtagataaatacttttatatcaacattgataaattagttaaaaattaaaaatagttttacactgatactattaacttgctaaatagcagataaaatgcttgcaatatcagcattttatctgctatttttttattaaaaaatgtaaattaaaaattgtgaaacaaaaataagacttgtatttaaaaatagatgttggtattatattagtgtaatagataaaccacacactagtgaaggcggtgtaaagattgcaatttcaagataatattccaatctatgtacaaattgagaagtatctttatcgacaaatcgctttaggaaagataaagcctggtgaaaaggttccctcagtacgacaattggcggttgatttgactgtaaatgtaaatacagttcaacgtgctcttaaccagatgaatgttgaaggaatccttgaagttagacggggccttggttcatttgtcacaactgatacggaattgattttacaaaagcgcagggaattaattaaagacacaataagcgagtttttagaaagtacagcacagttaggtctaaccccggaaaagacgcttgaggagcttaaaaagtttattgaagagaagaagggagactaagatgaataaattactcgaagtaaagggattaacatatcgcaaaaatttgagaactattcttgataatgtaaatttagacattgattcaggtaaaattatcgcgcttttaggtgaaaatggtgctggtaaaacaacattgatgagagtgatcgttggtattgctaaacactatcaaggtgaagtgcttcttaatggggatagcagtgaagtttaccgaaaggctaacattgctatgactgataacctgaaagggttaagtgattcaacaaaagttggtgaagtagaagaattttatcaaaagttatttgtagattttgatagtagtaaatttgagcaattacgttcttttatgaaactcaacaatgagatgaagctcgggcaattatcacgaggaatgcgtgaaaagctggaaattgctgtaactctaagtcgagaagcaaaattgtatttacttgatgagcctttctctggaatcgatccaatggctagaaaaagaattattaattcaattttactttggaagagtccagacagcactattgttatttctgatcactttgtaaatgaaattacaacgattttagatgaagtggtaattgtaaaagacaagaagattgcaagtcacttatcagcagatgatattagagcaaagggacatagtattgaagaatattatgaaagtctatatacagatgaaggagctgagtaaaaatgacgacctttaaagcattatttagtcaaatgggaaaaaagaagcgtcgcagcgtttatttactggctctcttacaattggtagcagcctcagttttcgcgctttgggcattattttcaaatggcgatgcattttctagtcaagctaaaccaatagcctggtttgtaatgttatctacttttgctccgtttgcggatatggcttatgtggtactttctgcttggcaaaatgagaaagaatatagctcacaaacttggcgccttgttccaatttcatcaagtaaattttacttagctaatatcttatcagcgtttgttaatggactttacttggttttaattcaaattggaatgggaattattacttttttgccagctcttttgagtaaagacgttcgaacaaatatctgggaaattaatcaagctatttctaagtcaagccatgctggtaacttttggcaaaagtttcttgagtcatttccattcggagaaatgttgagtgcatttttagcatttttgttgttcgctgtcttagtttatagtattgtgactgcattaaatctctcaagtagaacaattacagactttcttcctgataaacatagcaagttaatccgctttgttattatgattgttttgatttttatctttattttcttatcagataatctgattaatttattaaatcaattgcgttggggagaaacctcaaatagtttacttgcatttagcgagagtaacttgatggttgccttgattgatgttgctttaggagcagtcaacatttggcttttaaagaatttccacgaaggaaagtagggaatactgatgacatctttttcatcaatatttaaagaattaactaaaagtaaactgcggcttgttcgtagattagcactcctgcagattgttgttggcgtattacttggattttgggcacttttaaaaatggcctttcaaggtgaaagtaaatcatatatgttaacagctttcatcacaatcacgccattgtttgatttggcatatttattcctttcaagtaggaaaaatgagcaagtttatgcttcacagacttggcgattagcgccgattaagaacagcgcattattatttgctaacttaggttcagcaattattgatggaatttttctagttattttacaaatagttatgattgtaattgctggattgcctgtaattattacaaatgagttttggcagacaacttttaaaaattttggctcaatcggagaaggaaaattatggcaggatatacatttagcagatttgctttctgtcattttactaataattttgattggaatgtttatttatcttgcagttagtttgataaactttactgggaagatagttagtgattttctgccagaaaagataagcaaacttgtttatttcttagtagttgtttctctaacttgcattggcttaatattcttgatgaatgtttattggtttgtcatgaattcattaactgggtttttgcaaaatggcatgtttttaaccaccttgagtaaagatgctattgatgtaagatcaaacctaactgagaattacttaacaatggcagtagtactagtagttgatatcattttgattatcgttaatatttttcttttgaataaatatcatgaggctaagatataagaaaaggaataagattttgaaaatttgatttcaaaaccctattccttttttgctattattaaaaatcagattaagaattagcttgaatatagtcgaggacttgttcagcttcttccattgtgtattttgcttcgccagtcttcattgcatgcaatttttcgacagataggtgacttgaaaaagcaagcgcagtatcgttgacattatttttaacttcaaattcaataattgcatcagataattcttcaggactcattttataattcacactttctaaatttataaattaaaaccattgtatttgatcgaatggaaaataccttaatttgacttcaccaacaatatcttttcttttgataaaaccaatcatccgtgagtcttttgaaatgttccggtgatcacccattacgaaataacagtcttttggtactcgttttacatgataaagttgctgcaggttgaaattattggtatacagttgccccttagcaagctttttcttgtattttgttaagtacggctctttgattggcttcccattaatatacattacatcattttttgatttaatgctgtcaccaggcacgccgataattcttttaatgtaaagtgcacctggttgatctggcgctcgtaaaatcacaatatcaccgcgtgagagtttggaatgtcttactgcaatgattcgatcattattctcaaaggttggctgcattgatggtccagtgatagtttcattagcaagtagcacacggaacataaaaatatataaaccgaaaattacaattgctaaaataaatacctgcaggagccagtgaccaagggattcagccgattcagttttatgttttgacataacttttgctccttaatgcttacatcacttttattatacctgtttttattaactttgaatggtaaaatcatttcgtagggaatgtatcaaatgaaacagtatcaaattaaactaaatcagttagacaaagaactcaattatttgcctcttcataaacaagttaacataattaataatataattgctaatcttcagcaaaaaaagattttaccaaaatcacctaattcacttggatttttacctgatagcttagatataatgatagataatatcggaaataaagataaagtccaagaagcaaataatctccttaataattttcggagttttctctcaagagaatatggagtttggtctttgccaaacttagaaacagctaggttaattaaacaagagtatcatgttaaatctagcttagaaattatggcaggaaatgcatattggtcaaaggccttaagtcaggtagggataaatgcaattgcaagtgactcattttcttgggctaaaagctcaacaactggcgaagctccgatttttacaacagagaatttggatgctttgagtgcaattaaaaagcaccctgaggttgatctaattatttgctcctgggcgcctaattttggagaagatgatttaaagattctcgatttatatcgtagtcttgatcatcaaccggtgttactgtttattggcgaaaaaaatggtgctacaaattctgctactttttggcagaaagcaaaaagtaggactaatacaaaagttaatcgtagctttcaaagcttcgatttcattgacgaaaaggtttttgaaataaaataatgaaaataaaacgacttattcttttaataatttcttttgtagcttttttgggattagggttgattttatctcgtcaacaatctcaaagagctgatcaagttttaaataataatggtttgtcgagcacttattatgtttttaaatctaagaaaaagcatagtattaagcagttattaaactatgtgaatagaaatttcgctcatgataaagtgcagattcattttgaatccaattatattccagatagagtcttgatttgggctaattataacttaaagagtcaacccctagctaagggaagctcacgttactttactaaaagcgactttgatggatcaattccttttgcagttatttcagcggataccgaaagtaaagttgtaactttacaaaataatcattatctaaaggagaataatgattatgtcactattattggtgaattaaagcgaaacaatgagagccaaaacggacaagcagtttattatctttcaactgggattaatcagcccacggctaaagagtcaattaataattacaaaatcgtagtagatggtttgaatagaaatgaagctaattctatgcatgcgtatttaaaaggaaacatgcagactaaagatttcagtaagacttataataggcagcatggaattagccctactaagaaactaattgcagctatcttgtgtgtggtaattgctcttgtagttgctgcaatagccgctgttttagctgaaaatccagtaaacgtaaaatttgtacctggaaaaatatgggcccacttattggctgattctggactacgctttttcctagcaaacggaattgtaattttgttaactagtttagggctacagacttggaaattctattctaaccatagtcaactttatattttgtttttagtcgtatttgcaatgcaggttattacctatgtgttgatgctacttgtgataaaaattaagaaggaaaaataatgtcattaccagttgaatttattaaaaaatatcaaaatctgcttggagaagaagagagcaataaattctttgcgtctattgatagtccaagtaagaagggctttcgcttaaatcctttaaagaataattatcaggatgttcagtatagtcttgaagagcccattgaatttactagcgatggttactatggtgaagtttcaggtcgtgacagcgagtggactggtggttatgtttattcgcaagacccttcagcaatgtatccagccgttgctcttaatgtaaaaccaggagaaaaggtgcttgatttatgtgctgcacccggtggtaagtcaactgcactagcaagttttctagaaaataagggacttttagtagctaatgaaatttctaagagtcgggctaaagatttacgagaaaatttggagcggtggggagctacaaatgtcgtagttacaaatgaaagtcctgaacgtttatcaaaaaaattaccccatttttttgataagattttggtcgatgcaccttgttctggtgaaggaatgtttagaaaagatcctgcagcaatgcagtactggtctccagaatatgtcttaacttgtcaggcaaggcaaaaggaaattttgacacaagcaatgaagatgttaaaacctggcggtgaattggtttattctacctgtacctattcaccagaagaagatgaagaaattgttgcttggctagttgaaaactatcatttgaaaattgagcctttaaagttatatcccggaatgtcaatgggtaaagctgattggtcaaagtctaatttacctgaattaaaagacacagttagactttggtttcagaatggagtaggtgaaggccagtttgtagcccatttgagaagtactgaagcagttgaagatgcttcaggtaaaaaagttaagaagagaaagaaaaaacatcagaaaaagagctctattacgcgtttaactaaggatgaaattacaacagtagcaaaagttttagataattttgtactgccagatagtttagaaaattggcagaaaacagttttacaaagtaatggtcatgtttttgtcccagctgttgatccagaattattaaatgaattacacattttaaataatggtgttgaattaggcctacttaagaaaaaacgctttgaacctagtcatcaattagctgaagttttaggtcaaaaagagcaaaagcaattgctcaatttgaaaaatgaaactgattatgaacattatctacatggtgaaactattaaggtaaatagtgaattgcgaggttctgttttagtcgcatatcaaaatcatatctttagttttggaaaaatcggcaatgatcaaatattaaagaatttctaccctaaaggattaagaaaataaaaaagactggtatttgccagtctttttagttaatcaataaatttaacggcagttccgtaagcaactaccgattgcatatctcctgcaatagaccctgagtcaaagcgcatcattactacagcgtctgctcctagattcgctgcattttcgcaaagacgattaattgcttgatctcttgattcagttagcatggatgtgtaggctttgatttcaccaccaacaatgctttttaatccagcacctaaatcgcgaagagcattctttgactgagtagttacaccgaaaacttcaccaataatttcgtatttttggttgggaatattttcagtggttgttactaaaagttgatctgtcatattgattcctccctaaaaatattttcttaattatactgaagcaaacgtatcagtgcaatttattttgtataattaagaaaagggtacatctagaaatatttacgttacattaaggtggtgaaatgataagtgatcttatcattttcaattgtattaattttatttttattggctttagcaacctttgtttgggtattgacccatgaaagacgtagtctgtggtcagggatgacgttagtttggacaataataactttcggtctaatcacagcagttagcttaatgattgccgcagaaattttcccaattacacatcaatttgttctgcttgtttttgctttaattttaattgcattgatggttttggtcttggcatttattgcaatcttaatagtaatgtttatttataatggaattaaaattttaattcgggaaggtaatcgttggactaactttttatcattagcaatgggaattggaattattgcttacttattcttgttccctatagttggacgattgacacgcaataattttggtacttacttgtatctatttgttaatttgaccgtcatttacttaatttttattatgatgatgtatactttgacttcatggattaatctgatcaattttaagactaagaaattaaattacatcgtagttctaggagctggtttaattggtaaaaaggtgacaccgctgcttgcggctagaattaaccgtggaattgaggtttatcgcaataatccaggttcaaaaattattatgtcaggtggacaaggaccaggggaagaaattccagaagcagttgcaatggcaaaatatgccgaagaaaaaggaatctctaaccaagatattattgttgaagataagtcaaaaacaactagacaaaacttagctttttcgcataagttaatgaaatccaattcacgttttgcaattgtaacaaattcttatcatgtgtatcgcgcattagttttagctaaaagaatggggctagactgtatcggttatggagctaaaaccaaatggtatttcactttaaatgcatttgtgcgggaatttattgcttatttaacgattacttggcgtttacagctgagtatagttggttttattggcttagttgttttattaggagctttattgaggtaataggatgaatgaaattaaagtaattgcgattgatgttgatggaactttattgaattctaaaaagcaattgaccaggggagtaaagaatgcaattttaatggcgagaaaagctggaattaaaattgtgattgcaactggaagaccattaagcggtgtaaagcaaattctgcatgaattagacttagctaatcaaaatgatgaatatgttgtttgttttggaggcggcgtggttgtaacaacttctggcaatgttttatttgaaaagcaactgacctatgataattatcttgatttagaaacaatagctttaaaattaggactgcattttcatgcttctgctccagatcgaatttatacagccgatcgtgatatcggagattttacgctatatgaggctaatttggttaatttaggtatttcttatcgaacaccggctgaaatgaaaaatattccaattattaaatgcatgtacgttgatgaacaaaagtacttagataaaaaaatcgcggatcatatgccatttgcacatttagatgataaaattacatttacaaaaactgcaccgttttactatgaagctaatccaaaaggtgtttcaaaaggaaatgccttgaaatttctttgtcaaaaattgaatttaactagtgaaaatataatggcgattggggatgaagagaacgatttaagtatgattaaatatgctggaattggagtagctatgggaaatgcagtaacgcttgtaaaagataatgctcaaatgattaccaaagattgtgatcatgatggggttgctgcagcaattgaaaaagttttacaagaaaaataaaaggctttcggagtgaattttccgaaagccttttgtgactttagcgatgtttagatggcatgcgtaattttctttgtttgaataattccattattagttggaaaaagccataaatgattaataaaattcctaagctaattactgcttgcctactaaagtaatttggatttataatcacaataattccagcagcaaaggcaattaaactttctaggacatcaatgatatttctaaaaatcccatttttcttatttttgacaattacgctacgtaatcttacgtaagcaaaaccaattaagaaaatacctaaaacgtagtgtgctaggaagttaagcaagcgattatttgaaataattgcaattgcgagaccaaagactattaagtaggtaataatgaagaatcgtttgggtttaggtaagagatgagaatttgcagcctcaacaatgtgataaccactccaacctatgcagaagagggcgactaagccaccaaacgcacgataagcataatcaggaattgtgagatcgacaatacccagaagaattagaacccagccaataattgaattagtgttaataaaaagtttttcaaggtgggttgctttaatgcttcgccaaatggtttcccataaactacctaaaacgaacctagttcttcttgaagaatctgtaagtgaaaaaaggattgcgccgaaaccaccaaaaccatttttattaagttcagtaattttggttgcaccacttgcggcaaaagcactgaacaaatcattagttaaggcttctcgctcttgtagatttgcttcgccaatccattgattgataatttgattatatattttagaagtagggttcctgtgagctctagtaataaagtgagatcctgaaacttcccaactcattggatcatgctgggcaagtttaggccgatcactgactaaaatggttggagtaatattttctggctcaaacaatcgtccaataatactaaattcgggaacatagcgtttcaatttatcggttacaccgtcaacttgggtactcaagccaggactgtcaaaggtatagatagtatcaatattatcttttaaatcatctggtaaattaacagctgcatattcagctagattgcctcctttagagtggcctgcgaggctatacacctgattagtgtttttaagaatatttgtgagatatttcaaggcatatttttgagctccagtagttctaaaactaatctcaaaatcctctttccagccaactaatgtatcgtcagtaccgcgaaaagaaataaaattagtatcattatctaagctgatttttatcgcagaaaactgaatgcggtcagttagaacgtctgcaaaataagataatttggcatccccaaaccgaacggaattagccattaatttaagtaaatcttgatacttgtagtgatctaagttttgatttgatgaattaaaatattttttagcgacttctttaattgaaatttctttattagagtctgggacgattccatcgagatgaatataagaaaatgtggcaatcactaatgcatctacttcgtcaaatggtcgtgcagaaagggaaatatcgccacgccattttatgtaagacaaaatattatttgtatccatatttcatccatcctttctgctagctacaattattatatataaaaatgttgtattttttattaacaaagtgctaataaaaaagaaaatcgcttactattcttaagtctaacacaagcgaaataaagcgattaattaactttgtttttgtagaaatttcaaaagataaaggaaatgattagaaaacaaaaaagcagagataattgcaacataatcgttgtctatcatctctgcttttcaaatatttgtcttaattattgaactttttaccccaagcccatggatcttcatgccaagtcttcaaaatatcatattgttcactagtaatatgaccagattcgttttctttcttcagcaattcagggtaggaaagaagtggtgcatattttacatttgcctttttaaagttttctttggcatctggtaagtaataagtgaaaattgaagaaacaccagcaacatgaccaccatctttttctgtggctttaactgcattaaggactgatccaccggtggtaattaaatcatcaatcaaaacgatcttatcattttctgagaagcggccttcaatttgacgaccttttccatgatcttttggcttaggtctaacgtaaatcattggtagatgcaatttttcagcaactaaagcagcatgtggaattcctgctgttgcaacacctccgacaattgttgcttcaggaaattcttttgcaattaagttggccaagtcgctagcaatcatgtcacgcaattcaggataggaaacagttaagcgtaaatcggtatagattggtgaaagcattccgcttgcgtatgtaaatggcgtatcaggtgaaatggtaataattttttcttggattaattggctgataatttgatctttatgcattttagttgaactccttcttaattgcttcgtatgctgcttctggattagttgctagggtaatcggtcgtcctacgacgatagcggttgaaccccattcttttgcttgggctggggtagctactctagattgatcatctttggcatttcctgctgggcgaatgccaggagttacgtataaaaagtcatcgccaacattttgacgcaaattcttaacttctaatggtgaacaaattactccatcagctccagcctttttggcagtttcagctagacttaaaacttgctggttcattgataagttacaattttgttcttcgtgcaaaatatcatcagaaattgaagttaattctgtaacagctaataatttagggatatttttaccgaccggggtgccagcaattaaaccttcttttgctgctttaatcacttgactaccaccaagagcatggacagtagtataagtgattcctaattgagctaaggctttagcaccattgtagacggtattaggtatatcactcatctttaaatctaaaaaaatttggtagccttgtctagataagtttctaacaattgcaggaccttcattaaaaaagagttccattccaattttaataaaaacattttctggtttacctagcttaggtaagagttcatttaatttcttttcattgtctaaatctaaggcaacgataactggtcttgtcatttttcctccataaaaaaagtctacaccgagcgcagagagacactaggtatagactttcccagataatttaagccaataatttttaacttgcggtctctctgtaccgtttaaagtttaatcaaaatgaagtttagcaccttcggtcgagaattacaaataaaatttttaactttgaaaaaaataaaaaagcgtgtacaatcagttcttgaaaaataatcgaatgaccgtgagcattcattttggaggaaaatatgattaatacgcatgtaaaattaccgggattagatttaaagaatccagttatgccagcaagtggaacttttggttttggagatgtgccagcagctaagaagtttgatttaaatgatcttggagcaatggttattaagactactactccgcatgcaacaacaggtaatcctcagccgcaaatagctgttttagagaccggagttttaaattcagttggattaacaaatcctggagttgatgcggtaattgaagataagttaaaacctttacgtcagagttatcctgatttgccaatcatggctagcgttggtggcgaagatgaagcaggttatgttgaagtagctaaaaaattatctgattcaggtttagttaatgctttagaaattaatgtttcttgtcctaacgtaaaccaaggcggaatgagttttggtgttcatccagatgtagttgaatctttaactaagaaaattaaggcagtgactaatgttcccatttatgtgaagttaactccaaatgtgactgatattacacaaatttctaaagctgctgaaaaaggcggtgcagatggtttgtccttaattaatactcttttagggatggatattgatattaaaacaagaaaacctgttttaggccacaatattggcggtctttctggagaagcagtcaagccagttgcgcttagaatggttcaccaagttcgtcaaagtacaagtttgccgattattggaatgggcggaattagttcagctcaagacgtaatcaaattcatgcttgctggtgctaatgctgttgcggttggaacagctcattttaaagacagtattgcgtcaaagcatattgctgatgaattgcctaatgaattagaaaaattaggtattgaagacattaatgacttggtcaatcaagttgaatttaattaaattgcttgacaaagaagataatttacagtaattttaaagcaatgaatgtcctttaaaattagtcccgtgaggctagcaaggcaggcttaaataagtatgactttactataagctcctagtctctgacactaggagcttttttcatgggcaagaccaggagggtaaaagatggcaaaggaaatttgggatgcattagcaatgaagcgtgcactaactcgaattacttatgaaattattgaacaaaataaaggaacagataatctggttttgatcggtatcaaaactcgtggtgtttacctagctaagagaattcatgatcgtattcaaaaattagaagacgttgatgtgccagttgatgaactagacatcactctttatcgtgatgatcgtcatgatgcttcattgaagcaagatccagtaattaattccaataaaataagcgttgatattaacgataagaaggttatcttaattgatgacgtaatctatactggtcgtacaattcgagcagcaatggacgctttaatggatgatggacgccctagttcaattaaagttgcagttttggtagatcgtggacatcgagaattgccgattcgtgctgattttgttggtaaaaacattccaacagcagctgacgaacaagttgctgttaacatggtagaaaaagacggtagggattcagttgaattgaagtcattaccaaaatagtttggaaatattaatttaatagttaaccatttaattgactccagagagggccagaagggttgctatatttttcgtgtaccagaatacgaaaaataggcctggagcaattaaatgcttcaggccttttgttttagaaagaatataaaaatggaaaaattaaatcttgttagtttaccacattttgttagtgtagaaaatttaagcgctgaagaagttgaagccttaattaatcgagcagagtactttaaaaatggtggagcaacaccgcgtttaactcagccagtttatatttcaaatatgttttttgaagattcaagcaggacgcatactagttttgaaatggctgaaagaaaattaggtttaacagtaattccttttgatccagcacattcttcagttaataaaggtgaaactttatatgacacttctttgattatggatgccgttggagtaaatattgaagtgattcggcactcacagaatgaatactatcaagatttaattcatccaaaaaagcaccaacatttaaatattggcgtaattaacgcaggtgacggaagtggacaacaccctagtcaatgcttattggatatgatgacaattcatgaacattttggccattttaaaggcttgaaagtggctatcgttggcgacattactaattcacgtgtggccaaaagtaatatggaattgttgactagactaggtgcagaagtctacttctcaggtcctgagtattggtattcaagcgaatatgataagtatggaaaatatgaaaaattagacaagctaattcctgaaatggatgtcatgatgctcttgagagttcaacacgaaagacacagtgatgatccgaatgaaaagaactttgatgcccaagcataccatgaagaatatggaattaatcataagcgttaccaagaattaaaacccgacacgattattatgcacccaggcccaattaatcacgatgttgagttaagtggtgacttagttgaaagtgacaagtgcatgtttacccgccaaatgcaaaacggtgtatttatgagaatggcaatgattgaagcagttttgcggggaagaaaattaggagggcttaactaatggcaactgtaataaaaaatggaattaatcataagcgttaccaagaattaaaacccgacacgattattatgcacccaggcccaattaatcacgatgttgagttaagtggtgacttagttgaaagtgacaagtgcatgtttacccgccaaatgcaaaacggtgtatttatgagaatggcaatgattgaagcagttttgcggggaagaaaattaggagggcttaactaatggcaactgtaataaaaaatggaacagtttatcagaatgggcgcttaattaaggctgatgtcttaattgaaggtaaaaaaataaaggctattgggacagatttggatgccgaaaaaattattgatgctcaagggatgcttgttagtccaggtttggttgatgttcatgttcactaccgcgatcctggtcaaacatataaagaagatattaagactggtagtgaagccgcagcacgtggtggttttacaactgtaggtgcaatgcctaatgttacgccagttcctaatacacctgaattaatgaaaaagatggtggaggaaaataaacacaaaggtgtagttcatatttttcaatatggaccgataaccaatgatgaaacaactgatattatccctgattatgcagccttgaaaaaggcaggagcctttgccttaagtaatgatggacatggcgtacagactgcacaaaccatgtatttagcaatgcaaaaggctaaagaaaataacttaatcattgcaactcacgcccaagatgattcgctttttaataaaggaatcgtgaacgaaggagtagcagcgaagaagctagatttaccgccagttactgaacttgcagaaacaactcaaattgcacgtgacctgcttttagcacaaaaaactggagttcattatcatatttgccacgtttcaactaagacaagcgttgaattggtgcgcctagctaaagcgcgtggaatcaacgtaacttgtgaagttgccccgcatcatattttattgactgatagtgatattcctaaagataatggttactttaaaatgaatccgccattaagaaataaagaagatcaagcagctcttttggttggcttactagatggaactattgatttgattgccactgatcatgcgccacatgcgaaaagtgaaaaacaaggcggtatgaaaaatgccgcttttggaattacgggaagtgaaactgcatttagtacactttatactaaattcgtaaaggaagaaaaagttttaagccttgagcagctattagcacttctcagcgacaaaccagctaaagtatttggaatcgagaatgcgggagttttagaaccaggaaagaatgccgatgttgcaatttttgatattgagcataaaaacgaaatcaaggaagctgattttaagtcaaaaggtgtaaatacaccatttactggtcaaaaagtatatggcgaaacagtaatgacgcttgtcgatggtgaagttgtatatcaaaggggaacaaaatgaaacgctatttaattttagaagatggcagtatttatgaaggagaaggcttcggagctgactgcgaaagtagtggtgaggttgtttttacaacaggaatgactggctaccaagaagcgattactgatcaaagttatgctgaccagattttagtttttaccaatcccttaattggtaattatgggattactttagccgactatgaatcacttgaaccgcaaattaagggtgtagtatgtcatcaagttgctcgtcatcctgataattggagaatgcaaacaactttgccaaaatttttagaaagattaaatattcccggtctacaaggaattgatacgcgcgaattggttaaaaagcttcgaattcacggtacattaaaaggaaagatcactgattctaaagaaaatgctgttaagattgctcaagaattaaaagaaaaaaatattactcaaggtgtgattagccgcgtttcaactaaaaattcatatccagtcccaggatctaaacgtaacattgttgtagttgattttggaattaagcatagtattttacgagagttagctgaaagagattgtaattgcattgttttaccttacactgcaagtgctgatgaaattttaagtcttaatccagatggcgtgctcttatctaatggacctggagatccagaagaaatggttgaagctgcaaagatggttcaagaagttgaaaaacatgttcctttgtttggaatttgtatggggcaccaagtttttgcgcttgctaacggtgctaaaacctacaagatgaaatttggacaccgtgggtttaaccatccagtacgagaaattgcaactggaaatattggttttacttcgcaaaatcatggttatgcagttgatcctgcctcaattgataaagaaaatctgatgattacgcatgttgaagtaaatgacgggactgttgaaggtttacgccataaaaagtatccagcattttcagtacaattccaccctgatgcaacaccaggtcctcatgatgaagattcattatttgatgatttcatgtcaatgattgaccaaagaaaggaagaagagcgtcatgcctaaaagaacagatattcataaaattatggtgattggttctggcccaattattattggtcaagctgctgagtttgattattcaggtactcaagcctgcttagctcttcgagaagagggctatgaggttgtcttagtcaattcaaatccggcaacgattatgactgatacgactattgccgataaggtctatattgaacctttaacagtagaatcaatttcaagaattattagacaagaatatcctgatgcaatcctgccaactcttggtggtcaagttggattaaacatggcgctagctttggataaaactggaattttagacgaattaaatattgaattactaggaacaaaactttcttccattgaacaagcagaagatagggagaagtttaaagaattatgtaaaaaattaggtgaaccagttcctccatcaaagactgttaataccgttgaagatgctttagcatttggggatgaaatcggttatccaatcattgttagaccagcatttacaatgggtggaactggtggcggaatctgtcatagtcatgaagaattagctgaaatcgctaagaatgggttagagctttctccagtgactgaatgtttaattgaaaaatcaatcgctggttataaagaaattgagtttgaggtaatgcgggaccatgacgataatgcaatgattgtctgctgcatggaaaactttgatccggttggtattcatacgggagattcaattgtcttttcacctagtcaaactttaagcgataaagagtaccaaatgcttagagattgttcattacgcttaattcgtgctcttaagatcgaaggtggttgtaatgtacaactagctttagatccaaatagttttgattatgatgtgattgaagttaatccaagagtgtcaagatcgagtgctcttgcttcaaaagcaaccggttatccaattgccaagatggcagctaaaattgcaatcggaatgactttagatgaaattaagaacccagtaactggaacaacttatgcagaatttgaaccagcattagactatgttgtctgcaaaattccacgctggccatttgataagttctctaaggctgatcgcactttgggcacgcaaatgaaagcaaccggtgaagtgatggcaattggtcgaactgctgaagaagcaatgcagaaagcagtaaggtcacttgagattgatgaaaaagatttatattcagaaaaagctcacaaagcaagtgatgaagaaattgagcaaaaactagttaaagcacaagatgatcgtctcttttatttagctgaagcctttagaagagggtatagtcttgaagatgtacacgaattaacgaagatcaacttttatttcttagatattgtgagtcatatggttgaaatggaaaagaccattaaagaaaataaggatgatcttgaaactttacgtttagctaaaaaatatggttttagcgatccaactatagctgctttatggaatgaaaaagctgaccaagttagagacttacgtaaaaaacatggtatcatcccggtttataagatggttgatacctgcgctgctgagtttgaatcaaaaacaccatacttctattcaacttatgatggtgaaaatgaatcacataaatctggtaagaaatcagtcgttgttattggttctggtcccattagaattggacagggtgttgagtttgattatgcaacagttcactgtgttaaagcactacaaaaaatgggctatgaagcaattgtaattaactcaaatccagaaactgtttcaactgacttctcaatttcagataagctttactttgaacctttgactttagaagatgttttgaatgtttgtgatttagaaaaaccagaaggtgttattgttcaatttggtggtcagacttctattaaccttgcagctggtttagaaagacatggagttaaaattttaggaacgacagttaaagatcttaaccgtgcagaagaccgtgaattgtttgatcaaattattaaaaagcttaagcttaatcaaccaaaaggattgactgctacgacgcatgaaggcgtaattaaagcagctgaagagttgggatatcctgtcttagttcgtccaagttatgtgcttggtggaaaagcaatggaaattgtttataacaagagcgaactagaagaatacttacacgatcatgtagatattgctgctgatcacccaattttagttgatgattatttagatggccgtgaatgtgacgttgacgcaatttgcgatggtaaagatgttctgttgcctggaattatggaacacattgaacatgctggtgttcactcaggtgactcaatggcggtatatcctccgcaaacatttactgatgacgttaaagagaagattatggacgttactcggaaattggcgcttactcttaactgtgttggaattatgaacattcagtttattgttagaaatggtgaagtatacgtaattgaagtaaaccctcgggcaagtagaacagtaccatttttaagcaagataaccggaattgaaatggcgcaagttgcaactagagtaattatgggtgaaagcttagctgagcaaggctatagcgatggtcttgcaccagagccagaaatgattagcgttaaggctcctgtgtttagctttagtaagttggctgatgttgattcatatcttggacctgaaatgaagtcaactggtgaagtaatgggaagcgaccatacttttgctaaagcactttataaggcctttgctggagctaaaatgcagatacctgaaaacggaaatgttttattgacaattgaagatagagataaagacaaaattttaccgattgctaagcgttttgctagaattggctatcggatctttgctactaagggtacagctgaatttttaaagagtaatggtttgcatgttgatctagtaactaaagttcatgaaggcgaaaataaagatgataatatcttgaatgaactgagagatggaaagattgacttagtaattaatactatgggacatgatattgaaaagaattcagatggctttattattagacggatggctattcaacaaaatgttcctttgttaactgctcttgacacagccgatgctcttttaactgctcttgaaaatagatcatttgcgacagacgccttaaaataaaaatccttgattaaggaagagatataatgacaaaagaaatttgggacaagcttgcaatgaagcgagctcttgtcagaattacgtatgaaattattgaaagaaataagggagtagaagatctagtcttagttggtattaagacgcgcggagtatatttagctcgtagaatgcgtgataggctgaaagaagtcgaaaaagtagatgttccagtaggtgaattagatattacgccttatcgggatgatcgaaaaaaagattttagtcaagaaaaaatacctgatttagagccgatggatctagatattactaataaaaatgttgttttagtagacgatgttctctatactggtcgtacaattagggcagcgatggatgccctgattgcaaatggacgaccaaagtcgatttctgtagcggttttagtcgatcggggacatcgagaattaccgatcaaagctgattttgttggtaaaaatattccaacttcacttaatgagcaagtgtcagttaatgtcagtgaaattgatggtgttgatagtattgaattaatcaatttaaagtagaaattttaagcaaagaaaataagctgtatcattgtttgtagaaatgatacagcttatttttaattatttaacttgtacattagtatagtaattattcttaattcagaaccttagatcaaggttgcaccaagcgaattcttgaagtggtctaatgcccattcttgtccatgctcagtaaatgttgtcacacctttagttgggactgtaataccgtagtttaaattataggcactcactgctgtatgaagaacacaaatgtcagtacatacaccagtcagccaaagatcatcaattttacgttcacgtaggtagttatcaagattggtattttggaaagaagagtagcgatttttattaaatttataaacgcggtcgctagacttatgattttcgtaccagtcttttaatttaccataaagttcttgaccaggagtgccaacgatattatgtggtggaaaaagcttatactcagggctgaattaatcacccgtgtgaccgtcggttgggaaaattacgtagtcaccattttcataaaactgatctgcaagctcaattaaataatcttccaatgcttgagcaggcttaccacaagtgagtgaaccattatcggcaataaaatcgttagtatagtcaataattaatagcgcttttgtcatgttacttccctcaaaataaatttcttaaaactatcccgaattacgtaagccagaagttacaccattaattgtaattggtaagatgctttcataaactccggcgatgtcagcaactcgatcacgtttaatcatttcaatctgaatgtagttaagaatgttaaagtaaggcatccggtaatttaagctcatttgcaggcttggattatcagctagcagctccttgttaccttcaatttgaagaataacttctttggtaagtttccattcttggtagatagtatcaaagacttgcttagtatcttcatcttcacataggtccgcatattgcttggcgatatccatgttagatttcgataaaaccatatcgacgttagaaagtagagagtggaagaatggccagccctgatacatcttttgtaaagtttctaagttgtgagaatcggcatcgataaaatgcttgaaggcagatccaacaccataccaacctgggaacatgatccgactttgtgaccaggagaagacccaagggatagctcttaatcctgagaagtcagtgattttctttcttgcggcaggtcgagaaccaatatttaagttagaaatttgtttgattggtgtagcttgcaagaaatagtcaagaaaggcaggcgtttcaaaaactaatttgcggtaaactttattgctgtcaagcacaatcttatccattgaatcacggaatccgccaatgtcatcttcgcttacgatttgtttagaaacaattcggtcgattgttgctgaagcaagcatttctaagttgtagtaggcagtgtcttgattaccatatttattttgaatgatttcaccttgttcagtcattctaatccggtcattaattgaaccgaaaggctgagcggtaatggcttcatatgaaggaccgccacctcggccaacagttccaccacgtccatgcataaaggtaatgttaacacctaatttcttgcccattgcagttaaatctttttgagccttatagaggttccaacaagaagctaagtagccgccgtctttgtttgaatcagagtagccgagcataatttcttgataatcgttctgggaagcaagccattttttaacaatatctaagttcaaaaactctttcatgatttcacgcgagttctctaagtcttcaactgtttcaaataatggaactacttggatgcgagcaccttgattgtctaaaagatcatattctttaagcataattgcttgttctaaaagatcggaaacactttccgtgtgcgaaataatatgttgcttaattacatcttcaccgatacgatctttgagctcacgtgcagtcttgtagatttttaattctttttgaagtaggtcagacttaggcttgttattagcatgaagattgcgtggatcgtcatttagctctttaagtagaacttgaactttttctttttctggcaactcactataattgtcacaaattcctgcgctttttagtaactctgcaacacatgcttcatttacgctagaatcttgacgcatatcaattgttgccaaatgaaagccaaaaatattaattgcttctaaaagttcagtgaagaaacttctgataactgcttgatcatggtcttgttcaagtgattctttaatcgtaattagatctgctttaaaagcttgaggattattataaacaggaattttatctaagttttctaagtcacgtcttttaacaaaactatttttatctactgtacctaaaagttggtactcagtatgaagcaagcgactctcaatatagtaaaaagcacgacgataaggttcattggttctaaatggtgaatcgtcatttgaaagtgctgaaagtttttcaacagctgtggaagtcttcatataagatgtagacattgagatagtgcggtaaagtttatttagctttttgatgtaatattcaaaaattacttggctctgcaaacttgcacttaactttaaagtgtcagctgttacataaggattaccatcccggtcgccgccaatccacattcccatcgtaattggggttgcgcctttaagatctaagttatacttcttagctaattcttgatagcgagccgtaaatttggtaattgctggaatcaaagccttaggatagtaagctaaaacattagtaatttcgttagatacttgcagcttgtgactacggataatgtctgtctgcattaaaatctcaatatatgcacggagcttttcagtccattcagcctgattgatggttccgtttttaacttcgcggtagttacgcaataagttgtgaatctggtcagttagttcaagaacagtctttctttgcacttgagtagggtgcgcggttaaaactggaacaacattaacatgctttaagatttcattagcgttttctttttgcgcaactaaatcaattgtatcttcaagcttgcccagataatcttgatcagtattgttgagcaagttaacttcgcttgctaattctacatcttcagaaatattaactaataagggaagggttgcaaagtagcgagcaaccaccatcatctcttgattagttaaactagcaatttgcttttcaagagcatcgtagtctttttgagcagaaatcttgatcaagtcttggatcttattaaaaacaacgtcgccgctcaattgacgcgtactttcattaagcaagttggttaaaatcttaacctcttcagcaaccattgcgtggtcactactgttttctaacttcttgatggacattaaaaagtttcctcctttttgtgaaagatttaacataaggatatcatacatttgtatgtttgaatattagtttgaaacataattttctatgctaaaattttcattgattatcatcttttctaagtactagatttattttaacaagtaaggaaactgaagtgaaagaaataagtaagtatcaacgattaagaaagaaattaatcgagaatagtgatccagaactagctagacaaatggaaagctatatgagaaataagtttaaattttatggtttgaagaccccagaacgtcggaaaagctatcatgatcttattaagttagaaaaagcgaataaaaaaattgattggaaatttttagatcaagcctgggtagatgaacatcgtgaagctcaatattttgtttgtgactatttaattgcactagaaaaatatctcaaatttgaagatattgaccatatttttaattatgtaaagtctaaacaatggtgggatacaattgatagtttaattaagccaattggaaatattggtttaagggatgatcgagtaagcgatttaatgttagtttggtcaaaggatgacgatttttgggtcagaagagtagcaattgagcatcagcttttgcgtaaagataaaatgaatgttgaattattaaatgcaattttagaaaacaacttgggtaattcagaattctttattaataaggcaattggctgggcactacgtgattattctaaaactaatccagattgggtaaaaaattttattagcaagcatcatactgagatggcaactctttcaattaaagaaggaagtaagtatttatcatgaagtctaagagtaatttaagcaaacttgttactcttcttgttttgtgcggctttttaattttggctattaagcacggcaatataatagaaagtttaatttttgttattttgatacttacctttattgccgtaaagtttatttttaataaaaattaattgaactactaaaagtctttctatatcagtgctttttactcatatatttggtcaatttttcatacaatatatttatagggagactagaaataggggatgaataaattggcttttattgaattaagaaactgttcaaagaggtatggtacaggcgctactacggtctgggcaaataaagaccttagctttgatattgaccagggtgaattagtaattattttaggatcatctggtgccgggaaatctactttattgaatattttaggcggtatggagaatgttactaagggagaagttattgttaatggaaataacattgcaaactattctgccaaggaattaaccaaatatcggagaaacaaaattggttttgtttttcagttttataacttaatacctaatttaaccgctaaagaaaatgtagaactggcaaatgagttagtagctaatccgcttgatgcagatgttgccctcaaagaagtggggcttgaaaataggatcaataacttcccatcccaactctctggtggagagcagcaacgagttgcgattgcacgtgcaattgctaagaatccagctttactgttatgtgatgaaccaactggagctttagattatcagactggtaaaaaagtccttaagattctacaagatcgtagtttaaagaaaaattcaacagttatcattgtgacgcataatgcagctttagttccaatagctgacaaggttatcaggatccaagatggaaaaataaagcaaattgaatataacgctcatccgcaagatattgaaaaaattgaatggtaggtgagtgagatgagtaaaaaaattttatggaaagatgctatcaattcactcactaattcttggggacgttttattgggattatgttattaatggcagttagtgcttttgcctttattggtttaaagatggctggtccagacatgagaaataccgctcaaagttattatcaaaatgtaaatttggcagatttaacagtcagttcaaattatggtcttgataaaaatgatcttcaaacgcttaggaatcacgctaaaaattcaacattagatttgggatatttgcaagatacaagcgttaataattcaaagactagcctgcgtcttttatcagaaaccaaaaatatttccactaatcaagtagttagtggtaagttgcccaataagaataaccaaattgcgattagttatttacttaaaaacaaatatcgtttaggggaatggattaagttagatgatcataataatttgaaaactaatcgttttaaagttgttggttttattcgaccaagcgaatatacggataaaagcaatatcggtcaaactactgtcggaactggtcaactttcaggaattgcagtagtgaaaaagagtgcttttaattcttcaaattatagtattgctcgcattcgttttgataaaactaaaaatttagatccatattctagtgcttatcaaagaatcattgatgataaaaagaaaaagcttattaaagccctagatagaaatggcagaacaaagaaaatagaacttgataagaatttagtatcagctcaaaagcaacttaatcaggctaggcagcaagttcagttagctgaagttaatggcttaaacgtagttgagcaaaaagctcaattagaaaaacaggaaagcaaattaagtaagcaaaaatggcaaatcaagcaattgggcaatgtttcttattatgttaatgatcgtaaaaatgatcctggctatgatacttaccagtcaaattcagaaaaaattgaattaattactgacatttttccagtttttctatttgcagtagcagctttagtcagtttttcaactatgacacgcttcattgatgaagaaagacaaaatattggtgttttaagagctttaggatatagcaagttagacactagtctaaaatttattgtttatagcttaaccgccgctttaacgggcgttttgattggtgcaattggaggctattggttattaccgcggataatatttaattcttatactgctaatctaacactgacgaattttcagactttattttcatggaagtatttatttttaactatcttaattgcagttttatgtacaacgggtgcagctttaattcaactatttttggttttaagagcaaaaacaagcgaattattgttgccaaaaccaccaaagaatggctcgcgaattttcttagaaagaatcaaaccactttggcaaaatttaagctttaactataaagttacgttaaggaatatttttcgttataaagtaaaaatgatcatgacaattctgggcatcgcgggatgtactggcttattgatgatgggattcggtattcgtgattcactagcaggtattagtcaaaaacaatatggcgagcttattaagtatgatttagttgcagttgataaaaatgatttgtctaagagtcagagcagaaagttaaagcaaaagcttggttcaaagcaaataaataagtatttaccagtacattttgaaaatattactaaaaagatcgacggaacgaaacaaaatatttcaataatcgtgccaaagaaagatcaaaatattaacgactacattaatctaagaagtagacagtcaggtcaaaaaatcaacttgaataatcatggcgtggttatttctgaaaagctggctaatctcttacatttaaagcctggcgataagttaattttaaaattgaataatggtaagaaagttaaactgccaattagtcggatttgtgaaatgtatatgggacattatgtcttgatgaattcaaatgtctatgagagatattttgaccagaaaatgaataccaatgcccagttaattgaattaaagtcagacgttcaaactgatgattttgctaattcgttgatgaaaactggcgcagttaatgcaattaatttaaatactagcaataagcaaataattgatagcctaattcaaagtatggataaggtgatgttcctgttaattggtttagcagtccttttagcaattgttgtgatttttaccttaactacaacaaatttagaagagcgaatgagagaaatttctactttgaaagttttaggtttctataataaagaggctagtctatatatttatcgtgagacgatcattctctcaattttaggtattttatttggctttttaattggaaattggctgcatagttttattattgacaatttagctccgatgaatgcgatgtttagacctggaattttatttagcaattatcttttgtcagcaataattccgctggcaattacagcaatcatggcaatttttgtgagccgtgaaattaaagaagtcaatatgcttgaagctttgaagtctgtagactaaaaaagaaccgtgtgcatgttgaagatgcatacggttcttttgcgtttaatgaataagttttaaaatcggaaatcattaatggtgtagtgaatagcaatataaaacgagcaagcaagaataaaataaagagaataacaaattgcagattttgttgatttataccataacgaacaaaaatatcatcggttagtttctactactcaattattggtggaacaagaaaataaaaattagcttaatatttttaataatggtatcatttacctaattaaagaaatgaggtaagtattatgagaagatatttcagcgttcgcgggggtgcaggcgacttaactaagcccaatgttaatactagaccacaagataatttatatttagcagttaactctgagtggctttcaaaagcaaaaattccagccgatagaacttcaactggaatcaatttgattttagacatgcgaattgaagacaagcttatgaaggattttgaagcttttgctagtggtaaaaagcctcttcctgatgtgccaaattttaaaaaggcagttaactactacaagttggcagctgattttgataagagaaataaggatcaagcagagccaattaaaaaagatctaagcagattaacttctttgaaaaattttgcagaatttaaccaaaaagcagctcaattaatatcgagtggctatgaattaccacttgacatctacgtatctgaggatatgaaagatacagatcataatgctttatatgcaactggtccacaacttttcttgccagatactactgcttatcaagttccagatgctgaaaaattactttctgtcttagagaagcaaactgtaaaattacttacgatggctggagtaagtgaagaacaagctagaacttgggccaagaacggtattgaatttgataaaaaactttctaagattttgaagtcaacagaagaatgggctgatgaagtggcaatgtataatccagctagtttgtctgactttgaggcaaaatttgatcaatttgatattaattcgttcttaaagcagctcttgcctgaaatgccagccaaagttattgttgcagaaccacgctactttaaacatattaacgacttcttgaatgaaagtgaatttgaagaatttaagggctggatgattattaaattcatcaataaaagtgcaacttacttatctcaggattttagagaggccgcctttccatttagacaagcagtttacggtgtcccagaactaccatctcaagataagcatgcttatcggctagctaatgctgcttttgatgaagtgattggaatttactatggtaagacctatctcggtgatgaagccaaagctgacgtaattagtatgattaaaaagatgcttaaggtttacgaacaaagaattcaaaataattcttggctttcagaagatactaaaaagcaggctattatcaaattaaagactttaaagttaaaggtaggttatccagaaaagaatagggctctttttgataatctagttgtcgatccaaataagaccttatatgaaaaccatgttttgattaatcaagaaagaattaaagatattcttcaaagattaaataaaaagcctgataaaagtatttgggaaatgccaggcaatttgaacaacgcttgctacgatccttataagaatgacttaaccttcccagcaggaatcttgcaagctccattttatgatgcaaaacaatctcgggctgctaactatggcggaattggtgcaacaattggccatgaggtttctcatgcttttgataataatggtgcgcaattcgatgaaaaaggcaacatgaagaactggtggaccaaagaagactttgaagaatttaataagcggaccaaggcagttgctgatatctttgatggcttacaatatggcccagttaagttaaatggtaagcaagtcgtttctgaaaatattgctgacttaagtggactttcttgtgcaattgcagctaacaaagcagaaggaggagagatgaaagatctctttgaaacttatgctaaaagctggatgcaaaagcaacgtcctgaagcaattactgccgaagtacaatctgatgttcatgctccgcagccaactagagtgaatatcccagctcaaaatcaggatgaattttatgaagcttacaatgttactccaaaagatgggatgtggcttgatccagaagacagaattactatttggtaaaagacataacgaaaagagcgatgagattaatcaccgctcttttttgatattattgctaattaaaaaaagtctgataaatagttcgaataacttcttcggcgtcgcctcgtctagttccgatcatgattgaaatttgagatgcaccttgattaatcatctgaattgaaatgttcttttgacctaaaggataaaggatacttgcacataggctaagtttgtcacgcattccttcaccaaccaccattgtaattgcatagtcatcgatccactgcatttgatcaggattaagcgaaacttgaatttcattgcaaatttgatcaattagttcggcattgagatcttcttttttgaaaataattgtaatatcgtcaattcctgagggcatatgttcataggcaactttatgttgatcaagaatttgtaaaatctttaaagtgaaaccagctcctttatttaataaatatttgtgtaaataaagggctgcaaagtttttaccgccagcgatgcccgtaattgtatgttgagctttaaagttggtctcaggtacgatcattgttccgggtctttcgggatgctgagtatttttcacattaactgggatctgtgcttgaatagcaggaattaaagcttcatcgtgaaagacagaaaagcctgcataagacagttctcgcatttcacggtaggtcattttactgattggctgggggtgagaaacgatagcaggattagctgaaaaaatagcatcaacatcagtaaaattctcatataattccgcagtaaaaccgcgggctaaaatagctccagtaatgtctgaaccaccacgtgaaaaagtggcaatatttccagaaggtgaaataccataaaatccaggaaagataattttttcagtggggtcgagttcaaggttacggagattaacataagtttcagggttgacagaagcatcatttggactgccggttacaactaaaccagcttgtcttggtgttagaagtcgcaccttaaatccttgttttttcataatcattgttaagagtttagcatttaaaaattcgccgtgagctttaaatgctgccatcaaataatcacgattaggaaaagtatgagtaggaagatcattaattaaagctttgatttcgttaagtccctgcatactcaagtcaaaatattttccaatttcagcataacgagcataaatttgtgcttgaattttttcacaattttgcttacgaagggtaagattggcgtacttgattagaagatcagtaaccttggtatctgatttacttctttttcctggggcggaaacgactacgacttggcgtttattgtcgttatttaaaatgttaattacttgagcaatttttgcacctgaagcaacggagctgccaccgaatttagctactttcatacggattagttatccttccttgaaaaattctagttgacttatattatgcatcattataacctacaaataaaagaaatgaggacatattatgaaaaaagaatttacggttgctatcttaggtgcaactgggttagtgggacagcgaatgatcaagcaacttgaacagtccactgttccagttaaaaaagttaaatttctagcttctaaaagatctgctggcaagaaattaaaattccataatcaagaagttgaagttgaagaaactaaaccagaatcattttccggcgttgacatagttttatcttctgctggtggagcagtttctaaaaagtttttgcctgaagctgttaagaggggcagtgtttgcattgataatactagtgcatttagaatggatcctgatgttccattagttgttcctgaagttaatggtgaagaaattaaaaatcatcatggtattattgctaatccaaattgttctacaattcaaatggtaatggccttaaagccaatgatggataaatttggcctgaagcgagtaattgtatcaacttatcaagcagcttctggtgctgggcacgcagctttagaagagttattcaaagaagctaaagactatatggcagggcgtgatattaaggaagatgcccaagttttgcctacagcaggagataaaaagcattatcctttagcctttaacttattgccccaaatcgatgtttttgaagatgatggttatagtcatgaagaatggaagatgattcacgaaactaagaagattctcttaaacgatatggatgcagctgatattaaagtaactgctacttgtgttcgtgttcccgttgaaattgcgcatggagaaagtgtttattttgaattggcagataaaaatgctactgtatctgatctagagaaggttttaaaagacttcccaggagttcaagtacagaatgattttagaaaacaagagtatcctcaaccattaaatgcagttggatctaacgatacttttgttggtcgaattaggccagatttagaaacagccggtgcctttaatatgtgggttgtagcagataatttattaaaaggtgcagctggaaatactgttcaaattgctgaaaagctagttgctaatgattggttataaaaaggaatgagttaaaaactcattccttttttagatatctaaaatattaagtaaagcattttccatttcgctagcatcaattatttgctcttgataattaccagtttgaatcaaattgtttacattcccgcttaagtcttcttttaagaagctattcaattctttaatagcaggaacgcctttttcttttacttctttaccagtaagtgcatgaaagactgtttcagggaacttatatgggctagcagttgaaacgatcacagttggtgtttgatcaagactaatttcttgatactttttagttacaaaagaggcaactgctgtatgtggatcgagtgtgtaatgatctttttcatagatacgtttaatttcagtttcaacttcatcctctgtagcaaaaccagctgcaaataactgagctaatttttccttaacagctggactgattgtatattttccttccttgcttaatttattcattaattttgatagttcatcagcgttttcatcataaaggtcaaacaataatcgctctaaattacttgaaactaagatatccatggcaggggagttagttaagtaaaacttacgttgacgatcataagtaccagtttcaaagaaatcagtcaaaacattattttgatcagaagcacaaataagtttatgaattggtagccctaattttctagcatagtagcccgcaagaatatcgccaaagttcccagttggaacggaaaaattaatttcttgtccagctgaaatttgaccatttttaactagttgaacataactataaaaataatagacaatttgcgggattaagcggccaatattcattgaattagcggaagaaaattgcaatttgtttagttttaattttttaactaaagcttgattattaaaaattttcttcacgttagtttgagcatcatcaaagttacctttaatggcaatcgcagttaagttaccgcctttaagacctagcatttgtcttaattgtacgggacttacaccgccgtaagggtagaagacaataacgtgagtatggtcttgacctttaaaaccactcattgctgcaccgccagtgtctcctgaagtagcagttagaataatgatatcagaatcattttgtttgattttgatagctgtatgcattaaacgaggaagtacttgtaaggcgatatctttaaaggcaagcgttggaccatggaagagttctagataataattgtttgcatgtttagtaattttgacaacttctttatcatcccattgattaccataagattcgcctacaatttgagtaagttgttcatctgagaaatcatcaaagaaggttgctaaaacttttttagccatttcttggtaggacatatttttaaattgttctaaatcaaaaattggcttaggaaaagtagttggaacaaaaagaccaccttctggtgataatccttgaataatagctgcgggagcatctaattgataatttaagttagcgcgtgtactacgatattgcataaattactccttcttaaaacatgtttgttcttatcattgtaacctgtttaactactatgatacaatcaaaaataaaaaaattattaaagaggcctttaaaatgaaaaccattgaagttgcaatgctcggattaggtacagttggctccggtgtgattaatattttaaaacatagtaaagaaaaaataagccaaattactgacacagaatttaaagtatctaaggtattggtaagaaatattgataagtatcgtagtttatacccagatttaaatctaactacagactttgagcaaattagtcaagatcaagatattgaagttgttattgaggttatgggtggtcttcacccagctaaagaatatatatcagaacttttaaggcaagggtgtacggtaattacagctaataaggatttagttgctagttttggacctgaattaatggcaatcgctaacgagcatcaaggtcgcctgttctacgaagcaagtgttgctggtggaattccaattttaagggtcctgaatcaaaactatgttggagatcagattaaacaaatttctggtattgttaatggtactagcaattacatcctgactcagatggcagataataattggtcatatgaacaggctttgagtgaggcacaaaaactaggctttgcagaagctgatccaactaatgatgttagtggaaaagatgcggcatataagctaattattctaggacgactagcttttggtattaatttaaagcttaatcaaattaaaagaattggtattaccgagataaatcagaaagaactagcagtaattaaaaagtttgactacacattgaaacttattgctaagcttgaaactcaaaatagtacttattatccagttgtaatgccgatgctagttccagagaatagtatgttgggacaaactaagaatgaatttaatggtatcgaaatagaaagctatgcaattggaaaatccttttattatggcccgggtgctggaaaactaccaaccgctaatagcgttatcaatgatttagtggctgcagttaaaaatgaagcaccttttaaaactgattggaattctacctctgcgagcgttaaggatatctttactagacagtattggtttaagattgatcattctcaaaacgaagtagtaggcaatttaatgaataggtatcaaattgaagaggctgattttttgaatgatgaccaatatggctactatttaacaggtaatgtaaccgctgatcaaaaaactaaattttttagctctttgaaagaaaaagatattaaagtttatagtttgtatgaagtttattaaggatagaaaatgaaaatttttgtacctgcgacatcagcaaatatgggacctggatttgattgtttaggaaccgccgtgtcgatgttcttagagttagatgtactagaaacaagcgataaatggtttgttgagcatgatatgagtggaataagtcatgatgagagtaatttaattgttaaaactgctttagaacttgctcctaaattaacaccgcatcgtttatcagttaagagtcaaattcccttaagtcgaggcttaggtagtagttcaacagccattgtggctggaattgagcttgcgaatcaactagccaatcttaatttaagtcagcaagataaatgtaaaattgcggcaaagattgaggggcatcccgataatgtcatgccagctatcttaggcggaatggtagttgcaagtaagatagaagatcaatattattttcaagaattaccgttgattccatttgactttcttgcttatattcctaattatgagctagatacgaaggcttcaagaaatgctttacctgaaaagctgccttttaagaatgcaacacatgcaagcagcattttaggaactttaaccgctagcttagctttacaggattatggaacagctaagagactgattgaagcagatgaatttcatgaaccatatcgacaaaagttagtgcccgaattagtaaaaattagaaaaattgcgcatcagcatgaagcctttgctacttatttgagcggtgctggatctacagtaatgacaactattgaacatagcaggactgaagagtttattgctagtttaagaaaagctggcttagatgatagaattgagcaattaaaggccagttctcaaggtgtatttatagaaaaataagataaaaagtctagaactaacatgatttcatgagttctagactttttgcctttttaggctaatttttattaaatgttatgttatgagtataagctacgattgattttataaaactattaactgccttttttctgtttgttttagaagttagaatggcaagttctacttttgacttccaattcaaaggtatataacatgagtttccttctaattctgggtaaagacaatataaccctaatgcaattccttgttgtgatttaataagtaagtctaaagcagaaatatcatttgcgtaagttatgtttatatttgaaaccgaatttttgattttattttgaaggctgataagatctattgctgcccaagtattatccagaaaaagcatattttgatttgtaaaatcattgatatttaaaatttttcttttagaaagaatattatcgttgggcacaatggctttaaaatattcagagaataaaatggttctttttatattacttaaaccttgtgcgtctcttccagtcgtaatgacaagatctaaattatttgatataagatcttgtttaaaatcattatgatttaggtcggttaaattaaatttaatattaggattaattttatgaaaattatttatccaaattggaagatatgtctggttaaatggagtatatgagtatcctattgttatttgacttgctgcatttaaattcttctttttaatattttgtaaggcggagtagtaattattaattaatggtttaatatcgtgatagaaagtttttccattttcagttattgttacatagtgtttattagtattaaacaattgagtgccaatttctgattcgattgatttgatagtatgagtaacggttggttgggttacatgcatatttatagcggtttttgagaaacttctagtttcagctaagttaataaagattgtcaatttttttatatccatatttgatataacctattcttattactaataacagatattaatttcacttataactatatacttcttataataaaaatgtaaacgatatcaattgttttttataagaaggtaataaaatggttcaatttagtgcaagggaaaaaggatttcataatgaaatagaagccgttattgatgtagataaagataatgaaaagctaaaaaaagtatgggcaaaagatattgctgaaaatactattggagcagttggaattaaaaaatggcttagaaaagcaaaccagaagggttcagtagaagttgatgcaatatcaggagcttcaatttccactggagcttttagaaaagcagctattaaagctgcaaatgaagctggattgataaaagtgaatacagatgcaataacaggtgcatctcaaaatgattcacattcggaatataatggaattcctaaaccagcaaattttcctcttattaataaattaactactgaaaaagagatagttaaatatgatgatacatatgatattgtcgttgttggagcaggtggtgcaggattatcagcagctgctacagcagcagaaaataatgcttcagtaatggttattgagaagcagggtatagctggaggaacaacaaattattctggtggtgttattcaagctgctggtgataaatggcagaaaaaatatactaaatatcaaaatgatacaccagaaaatcatgaaaaagaatatatgaaggcaggtgaaggacgagtttatcaagaattagttcatgatttcacccaaaattcacctaaaaatattgaatggcttagcaagatgggaattaagtggactagtgtgtatggacatactgaaattccctatgctaaagaaaattttgccgatcgaattcatgtatacgaaggtggtggagctggaggaaatggaattattttaactcaagctttactgaattattcaaaaaaacaaggcgcacgttttacatataatactgcagtagtagggcttattgtttctaatgacagacataaagtattgggagtggttacggaagatcattctcggaaacttaaatatttaaaagcaagaagaggtgtgatccttgctacagcttctattgatcagaatcttgaactagctaaagatttaagtcctcaacattatgaagatgtaaaagcacatcattgttggtcagtccagacagatagaggtgatggaattgttatgggaatgtcattaggagctgctgttactggttttggcggaacaattgattttgatgctagaactggaaacggaacagatgaccgattgccaactattccgtcaatttttgtaaatggtaaaggtttaagatttgttaatgaagactcaacatatgcatatggatttagagcaatttttaatcaagaaaagcaacttaataagcctacttatcaaatttttggacaaacatcaatttccgaaaaagcttctccatggagtactgaatcattagatacagatgtaaaaaatggtttagtaattaaagcatcttctcttaaggaactgtcatctttgattgatgtaccagtaaataatttagtaaaaagtgtaaatacatggaatagaaatgcagcgaaaggtattgatccagaatatgacagaacgatgggagtaaagccattttcaggtccgtattatgcatataagaatactcctggaaatcttggagcaataggtggtttaaagattaacaagaaatgtaatgttcttgatatttatcagcaaccgattactggtttgtatgcagcaggattaaatgcaggtggttggattggatcgtattatcctggttctggtacagctgttggtggtgttattcaccaaggcagacgtgctgcaaaatcaattctgggattagaataaagattaaaaatgaaattaaacggatatagcgattaaactatatccgtttttatgtgcgctgaggtagttttagtctataattatatatgtaagcgctaatatataggaggcaaatttgatgacacaatttgaaaacaataattttggggacgtattacttaatcgtcattcagttcgtcactttgataaggatgtaaaaattcctcgcgaagaacttagagaaatgatcaaagaaacaattactgcaccatctgcatgtaatttgcaagcttggcagttcatcgtagtagacactgacgaaggcaagaagaagttgcatgaattttacatgccatttaataatccgcaaattgatacttcaagtgcaattattcaaatctttggcaatactttagcttttaagaagtatcgtgctctgtgggatcatatgtatgaagaaaagagaatttccaaagaagaattagacaaggtctacaatacttttttaccattgtatgaacatgcggataagacaatgcttactgctgatgcaatggttgattcttcccttgctgccatgcagttgatgctggttgctcgagcacacggctatgaaacaaatgcaatggctggttatgatgctaaaaaagctgccagcgtaatgggacttgatccagcacaatatgttcctgtgatgggtattgcgattggtaaacctgataagagtgcggaagaattgaagtcggttagatatccagttgatgatattttgaaatttgaatagacgagagaagcggtgttgaaaaataccgctttttattttgccaaggttttaagagaagttgactatagcaaggctcttaaggttaagtaaattttttcggtaaacatttgtcagttggtcaattccgttttataatcatagaaaaagaaaaggatgataaccatgggactaacttttaacaatcctaataacttacaacaaatgctcgataaatttgcgactgttccagatccaaaaaagacaccaaaaagaccgggtgaagggcttgataagtctaaaaaagatggtggtcaaactccaaatgtcattaatgatgaaaaggaaccggaagtaaagagcaaaaagaagaaagataagaagtaattttaaaaccactaaaacaggtttgttttagtggtttttttatggtgtcatagatgaaacaaacagataataatgaacaagaatacattgttggaattactaatgtagtatctaagttaattgctggaaacgaacacatatcagtggaagaagctgaaaagcgttttaaagattcaaaggtatatgaatatttatgtcatccacctgtacctttttatgaagaaggcccagaagacttttatgaaatgtacgtgaatttgaaaactaagggattaatgattgataatactcagctttatttgaaaaataatccgcagctgtatagtttgcatcctgatgattaaaatgaaaaattatagtaaaaataaagaccacgcctgaaaaacatggtctttatttatatctaattgaaatagtcgtaccttaatttcttaatcaaatcaactagttcatgatttgtaccattttggataataaaatcataaactggtttgtactttaagataggaattagtagatcaggatcaacagaagggagaatagaaattatagattttttattgagctggttaagttcttttacttctgtagtgtttttcatttttcgggatgcttgagagggtggatagccagtgccccaaggcagcttaaagagggatttcatagtttccgccaaattaatttctccgctccaaccccaatttaggcctagagggaaagaagctacatttccattattaatatggctgaatagaaaagcatcttgtggggtaggaagatagccacattgaacattggggaaagtattgcaagccagcatcatcccttgaccagatgagcagccagtaacaatgaagtctaaagaacgactgttaattaataaagcgactgctattgaaacttgaacgtaagatagttgaattttactgtctggataaatgccgaagttaattaattcatcgttaggattgattgcttcatttaaataatgttctaaaatttggttcttttctttttgagaactagcttgaataacattttttgcaagtgagactcaattattcgtaaataaaaatatttttgggctactgataactagctatatacatattaaccgaaaataacgaacaatttcagcattgacgtagtaatgattaagaatatacttgaacgtataaaagctaatgttgattgttttagaggagaaagaaatgaaaaatcatcgtcgtgttttagttggtagtttagctagtgctgctttaatgagcttgtttttagtaaataatggttcagttaaagctgatgaagtcgttcaaccaaggcaagttcagcaaagcagtgaagtaagggttacgacgaatcaagataatgctaaaaagccgaacaatgatcaatgggccaatcctgctaattataaggatgatatcccagttcaagtgttaggtattaatgatttacatggaaatattgataccactgggaaagcatatgttggacgaggaatgcattataatgctggaaatgtggcacgcttaagtagttacttgaacaatgcggaaagtgattttaaagaaaaaaatcccgaaggtaacacatttagagttgaagcgggagacatggtaggtgcttctccagcgacgtcatcactactccaagatgaaccgacgatgaaatctttgaaggcaatgaacgttaatattggtactctgggtaaccatgaatttgatgagggattaggtgaatttgaccgcattgtggaaggtaaagctccccaaaaaggtcaatttaaccaagaagagcagaactatccccatgaaaattcaaatttacagattgttatttctaatgtagttaataaaaaagatcaaactgtgccatttaattggcagccatatttgacaaaagaggtaaaagctggcaataagtcaagtaaggttggctttattggtgttgtaactgctgatatgcctaaacttactttcgctaaaaatttaaaagattatcaaattctagatccagctgaaacaattgcaaagtatgatcgtattttgcaaaatcaaggtgtaaatgcgattgttgttttagcccatactggtgtttcaacatataaaggtaaaactagtggagaagcagtcgacattttgaagaagctgtatcaaatcgatcccaataattctgtagatttatatgttgctgcccattcacaccaatatgcaaatggtacagttggtagaactaaaattgttcaagccaataaattttcaatggcttatgatgacgcaattggttatattgatcctaagacaaatgattttgttaatggtagcttgataactcatgtttatcctgtaatgtcaccaaaagaagataaatttactaaggctgatcctaaagtcgaagcaattattaaagacgcagaaaatcgtactagcaagattacaaattctgtaattggtaaaacgacccctggtactgaaattagtaccactctcaatgataataaagaaaatgcagttggtgatttagtcgttgatgctcaactttttgaagctaggaagaagggaatccaagctgactttgctatcactaatggaggcggcgttcgaagcaacttaaatattgaaaacgacggatcaataaaatggaaatcagctcaagctgtacagccatttaataatcaaattcaagtatttaatttaacaggaaaacaaatttacgatgttttgaattcacaatacgttaaaaacggtgaacgttactacctcgttggcgggatgcgctatgcatatacagatactgatgatccatctcatccgcaaaaagtagctgttatgttagacggcaatggtaagcaatttgatttaaacaagacttatcgagttattacaagcaactatttagtagattcaactgctgaatttaagggtgcaaaaaaggtggctgatgtaggaattgatactgacttattcgtagattatttcaaagatcaaactgcagctggtaaactaattcttgctcctgaattaaatcgtaagttttatctaactaagccacaattagatgaattgttgaataagttaaagcaagaaacgcaagtatcaaagcaaggtacgacaaataatgatttaggtgagaaaaatagtcagattttagataaaactgataagttagtaaataaagcagatgagactaagacttctgaacaagaacaggctaagaaatcagaagagagtacgaagattatttatgtattttcaaaagctaagagagaggaaaatacacttaaagtcgtaaatgaacctgtaggcaaaaattctagcttggctacattaacaagaagtaagagtcttaatagaaatgaatctaagaaagcttcattgccaaaggcaggggcagaagatgtatcctggatttcttggttaggattagctttaactggcttagttagcttctttggattgggtattaagaaaagaaattaattcaaaataaaaccatcgcttttgcgatggcttttttcatatataaatataagtattaaaactattttctttatcgacattaaagcaatcaagtaacttagttgcagaccaatctgtgtcgtctgcttcaaagaaaatcgcagaatatttactaaacattttacttaaaatagcttgaatgaatagattgcaagatttttcactgaatgaacaaatataagctatctcgtttttctcagtaaaaattaggttttcaattttcccatcttcatttgtactatagtagccagtttgggtcggaacttctttaacaaaagtattctcagaaacagttagcggagatacggattgatgcattgcttggtaatatttatatagtagatgacaaagtatgtcatattttttattgttaatatcaaaggtatacagagaacaattagaatttagttttaccctcaaatcgtttttagttacttttggagtataacaatgacgtttacatttaaatccattttgaagcaataagtggactaaatcagtattagttgaatcagtcattacttgaagtgatttaccttcgatttgtttgatttcactaaatggaaagtaaatagggtatttgctcaggttaaattctaggtaaagatacttattatgaaattcattatgataagtagtaatagtacctatgttttgttcatcgcaccaaacatgatattgattatctttgatctttttaattcttacagacattttcccattcatcccttaaaatcccatatttcatagagtcataatatttaccattgtaataccgtacttttctgatttgagcttctttttgaaatccgagtttttctgcaacacgcatcatcgagggattaccagaccaggttgttaatccaatgtgttccaacttatcagtattttgaaaaatgtgattaatccaaattcgtagcgcagttgtgccatagccaccactccatttgcttgaatcatagattacaattccgatttcaagccagcgcgtttgttcatcaatccaatcttttgaaaccataccgattggctgcttgttaactataatgcagcgacaatcttcacttaataaaaatttggcaatggtgctgtccttgaatgattcaaaatcactaaatttctgataatcgttaaagtatggtgcattaaatttggtccattcaggctgatcggctgagaagccttgttgccaaattccttttaatgagttttctgtaaattgggttaagctaactttttccataattaactccttgattatttattatagtagtattttcttgaaagcgcttgataatataaatgataataaaagaaggcgattgaaatgaaaaatataaatgaaatcgttattggtaaaccggtaaaaattagccgtgttttaattggagcagctgcaattgttatactttcattatttgttactggctttagctatttgccttggtgggtatttataattgtcttaactctagaatttttattactttaccgacatatttcaattcttattggaggattaataaggaagaagtaaagattacttcttatagcaataatgatggtattaagttaatgcagcttttaggcttacataaaaaagatgagcaagtgataaaactagctaatattggaaatgcggaaattgtatataagaaaaatatcagaatcagtcttgttgattttaacccagattatcttaacttatatcttgatacaaaagatggacagaaatacatattgtctttagggaatactgactatcaaaagcttgctacaattatacagtttttaaaggataatcaaatagaattaatagataagcagggaattgtgcaacttttaagagaaaataagaatttgtttactcattttcacaataagaaatggacggctgtttgatgacaaaagaagaaatacgatctagggcattgagtcttagatcgtatttttgccatcttatttaattattatcttttctaagatatttatcgcctactaagttgcggtaaaagttggcaacagtttgacgataatacggttgaaggtaaagggaaagtagaaagttgatgatagcgattagaataattgcaattaaatatgcaatcaatgcttggaagatgagatcagctaatggtttattaaatggtttcaggtaaagaaaagcaatagctattccagctaaaccaataataaaataccaaatattgaaagttaaccaaatgatgaataaagtggttttattacctttcatgatcttgcgtgactcactgattgcttctgttgcagtcatttcgtgttttgaatcaatcatatctttcataatgtaaggcgtcattgcgtaggaaaaacttttaataatgcctggaactattaataaaagtccccagaagaaagtaaatagagtagttagtaagctagttaggaatgttttaaagaaatagccattagtaaaactagaaaacattgctttaaaaacatttggctttttacctgtatctctaaaagctaacgttgcatattgaactccccaggcaatcatcgtagcaattaaggcggtaattatagtgaatatgctccagcctaagccttgccaccatgaaataagagaaagattattagtattcaaactaccggtccagacataattagttatatattcgagaaataaattaataattccaggaatgattaacaatccaattacccatagccagttgcctttaagctgcttgcaagcaatttttcttaattctttgcggttgattttcattctgttttcctttccaagttaaatacatctttataagataaaaggcctctagctcaaaaaagttagaagtctttgttttcttaatcttcttttttgctttggtcccagatttttttagcagctggaatttttcctaaattgctaatttcatccttatcaacaacgattaaattgttaggaccctgagcaagttggttgaagctatcaagactttgatttctaaagtagccctcgccagcgctatcaagtgattcttgtaatttcttaattctgtaagcatcggcatcagcttgagttttgattgcttctgcattcgctttggctgtagcaactaaggcatcatttttcgccttagtagttaattcgatatttctggcttcaccttcagcacgtgcaattgccgctgttttttcacgatcagccgttaattgcttatccattgccttttgaatttcaggactaggaagcaattcgtcaacattgacacgaacaacgcgaataccataaatgtcagtcaaatcgccaattgcttcggcaagttgtgcgttaatctgactagttgaacctagagcttcgtttaattccattcggccaataatatcacgaaggtgcccacgaattaattgcaccattgattcaacagaatcagtgttgttgtagaagtacttataagagtcagtgacaagatagtttaaagtcagactagtagtaatttcagcgttatctttagtaataattcggtatttagaaatttctaaaggttgaagagctagcgacacttttctaattctttgaactccaggaaaaatcatcacaaagcctgcttttacagttcgtgaatacttacctaaagtttcaactaaaccttcatagttttgcggaacaatatgaaagcttaaagctaatagaactaaaactaaaatcaccaaaacaattagtaaaattcgcattaacataatactttaactccttttcttaattttgacttatattatcccaatatttttagtaaaatgaaatagtttttaaaatatttttcagataaaaattatttaagctgataaaaaatcgattataattgtagaaaatagaggacgaggtgggcatgtaatgactattggcgagttgttaaaacaaacaagacaatcccttggtttaactcaaacagagatggcagctgacattgtttcaacgtcttattattcaaaagtggaacgaaacattcatcaaattagtgcggatgaattgatcgctattctcaacagacatcatattgatagctcagctttctttgttcatttttctaattttaattcacaggaaaagagagattttctaaaagaaataggggatgcgtatgagaagaaagacaagcaagaacttttgacaatcaaaaaagatattgatcaattaccggattcgagacaaaagaagtattatcagctgcaaattgacttggttttgaatgtttatttaacaaaagcagctgatattccagctgaattaaaaaatgatctaaagaagtttgtttttcaagataataattggaatgaaaattcactgcagttgtttagagaaacaattcgtgtttacgatatagatgagcttagttttttaataaatgcaattttggctaagtatcaccagccagctgagttaccaataaaaacgcaggagatcttagggggcatttgtattaattttttagataagtgttatgagcacaacacacctgaattaataaaacaaccactccaatatatttctaaactttcaaatgcttcggaattgctgttagttaaaatacttaaaaattattatcaagcagtttttaataaaaatgcagatgaagtaaaagttattagtgatgttcttgaaaaagcaggatggaaagatttcgtttctgttttacctcatttaaatagctaaatgtgcgtatacgacaatacaatttctattacgacaaagaaatcttttcttatttaccttgttcaataataactgcaacgaggtgaacaaaatgaattacttatttcattatttaagaaaaagaccgggagcagtaggagttgtaattgttttaactattattacttcggctctaagagtgacgcacgctttaattaacgtaaatatttttaacgccttaattaagttagaatttcatggcttctttaattgggtaataattgatattgtagtgtttgcaattttgtctgttttcttagtgttaatgcaaattcagatggctaagacagtgcaacttttaagcttagacttgagaaaagatattatccgtcaattgtcaggaaaatcaattgaagattttaataagcaggacacaggagtctatgcctcttggttaactaatgacgtgactacggtagaaaatgatggcttttataatattttgcagagtgtacaaattattacagatcccttgttttcaatgattgctttagctaaattttcatggacctttattccaattattgctttagtttctctcttaacagtatttttgccgcaacttattcataaaaggcttgccagtgccagtctttcaacgactaaggctaatggaaagttgttgaacgtaattaatgatagcttgcggggatttaataccttttcaatttttggggttgaaaatcagctggagactagaattactaaagcagtctttcttttaatgaataaaaaagttaagcaagcaaagtatcaatcaattgcaaataatattgcaggtttttctaatattttaggtcaagttggaattcaagcatggacaggctatttagcacttgaaaagataatctcaataggtgtaataggttcgtctggaaacttggcttataatgtgtttaattctttagctgtgattgcaccaatatggactgaaatgacagctttagaaccaatttttgataagtatcatttaactgagaaaaagaactataaagaagagggacaagattttactgaaaataagtttaattctttagaagtaattaacttacaaaagaagtatcaagatagagaagtgtttactcgtccgataaatctacgtatttgcaaaaatcaaaaagtagggatttatggtaaatcaggtagtggtaaaactactttcatgaaaattatttctggacaaataagaagttataccggtgagattcagctaaataaagtagaattaaatcgaataaagtatagtgctctccagaaaattttactttatgtggagcaaacgccatatttattcaatgatactgtgcgctataacctgaccttaggagagcattttacggatattgaaataatcgatgcactcaaaaaggctaatttatgggaaacaataagtaacttacctgatggactagatacagaaataaatgaaaatggcaacaatttttctggtggacaaaaacagcgacttgctttggcgagagggttattgagaaagagaaaactatttttacttgatgaaagtactagtaatttagataagaaaacagcgcttaaagtggagaatacttttttagggctagatgatgtaactgtaatttttgttagtcatcaacttcataatgaaaataaggctgattttgaccagattgttgagatttgaaaaattgcttattaaatattagtgtaatagaataaatttgtgaaagcgatttattaaaaatattcatttaaggagtagacaatgaacgcaatttttgaaagaagagcagttagagaatatactaatgaaaaagttgatgaagaaaagattcaaaagttaatcgatgcttttcaagctgcgccgtgtgcactgcatcaaactgatgttatggagttgagcgtaattacggatcaagaacttcttaagaaaattgaagataatactaacaattcttgttataatgcaccgcttgtctttatgatcaatactaaaaaagatagtcaatttggtgaaagagatgcttctgtagcagcagaaaatgtgatggttgaagctttcgagttggggttagcttctgtttacgtaatgggcggagcaattgcgctgaacaaattccctgaaattcaaaaagagttgggaatggatgaaggctgcgaaacttctgtacttttgccaattggttatccagctaataatggaaagccagaagatagatcaaaacgttataaagttgtaagaaaataattgaaggtagtaaaaaacattgatcctgatactggaccaatgttttttatttgctcaagtcaataatcctatcaaacatttctttttcctggtcggagatcttatgagcaacttcaattactgcaaaatttgaatttttcagcaaagtctgatgaatttgtagtgatagttcattatctaaagcactcgttgcttcatcagctagcaaaattggacgctttgctaagatagatctggcaatttcgattctttggatttgaccaccagagagactattaccagtctgaccaacctggtagtcaagtcctttttctttgactaattctgttagaccagctaatttaatagcattctttaattcctctttggaatactttttacctaaagttagattaaaaagtagactgcggtcaaacatgaacggcttttgattgatatagctaaagtaatcgtgcgatttctgccaattgccagttaaattctgttggtcaattataatagaaccacttgttggctttaattgacctactaaaagtcggagtaaagttgtttttccaaaaccacttggcgccattagaaggactttttctttagcattaacagtgaagcttacgttctttaggatagttttatcatcaattgtatatgttaatttctcaactgataactgattaaaagatagatttgtagcagtttcatttttattattaaagttgattgctttttgaactttatcccaaataggcttagtagatcgaatttgattaagctgatcaagaatcattgtaattggattaatgaaatcgttggatagctgcacgatcattactaaagtaccagctccaatttgaccattaaacattaaaatggcacctactaagaatggaataataaagctgaagatatcagcaatggtaataattagcgtagaaatggcaccttgagtgtagttaagactgcgtaatgcattttccatttgttttgcctgcttgatgacataagaaataacaggaacttgtgcatcatacaacatggccgtttttgatccattaattgcatcaactgtagcctgagtatattcagcgttttgcttttcccagatagcagatttattttgaatatccttaatgaaaaacttttgaataaaaccaggaataattgtagcaataacgaaaatgatagttagaagccaggaattgatcaaaccgacaaaaattgaaattgcaaaagcagcaatctcagaaataatcattaattcattcgtaatttttagtgattcgatttgctttagatcattggtcattaaatttagaccgtctttttgtgaatcattttgttgagcaattaaataagtgatagttttctcttttaaattcaagttgatatcacgtgtaatatcggaacgtaaatatctataagcaaaattgagaaacataataatgatgagtgatactgctcccagcgcagcaataagaattaactgttttaatgagccacgatgatattgagcgctgttaagcataatcttcgtgacataagcgataacgacattaccacaagcacttatgcaggccaaaaagacataaagtgctagcttctttttgttagcaaactttagtgacataaatatacctttctagaccccatcaaagtgacttcatttaagtcgtttcttctttgatgaaaataatatagcatattctgttgaaaattaaaatagtattagatattattttaataaaagaatttggaggaagtgtacatgcaagaaaatgtaatgtcttttattaatatctcacctttatttattgcaattattattggctttgtagtttcatttaatgaaaatacttctataaaagtacctgctattgtagttattatttcgacaattattagttttcttttcccaatttttaatttaaaatcttgggttacttatccagtaattatctctgaaagtgcaatgtttgtcttggctgcaatgttattaagtcaaaagatgaaaaagtggctggcttggattttgggtttaatggtaggatttgtttgggcaattgtactgcttattttgctaggagtgacttttaatatctaatgcttattagaaagtatgaaaattctgattttgaccaattgtgtcatgtgatggatagggcacgcatgcaggaattaaagacagccaatatggagcaagtgtttattcaattgagggatgccccatatttagggtatttgttaaaatgcaaaatttatgtcgcaattaaggaagaaaaaatggtcggatttgtcgggttacgatcacatgaattatcgtttttatatgtagatccaaacttttcaaaagcacggagtcggaaagaaactaatggagtttgctttaaagcaattagaaagaccaataaagctagaagtatttactgacaacttggcagcaaaaacattgtatgaaaaatatggttttaaagtagtaaaaactgtggttgaaaagtggtctaatgagtatccaatagaattttcgcaggatacgatggagatgaagtaagtatggatatagaaaaatttaagataaaacttgaagatccaaaggcaacatattctgacgaagaggtagagtggctacttgataatatcggaaatcctgaaagcaaaattcgtgataatttagtttgtaatagttttggaagttcatttttcgaaggaaaatttacttttgaccaagttaaatatttgattgatcaacttcagaagaaaaatcttctatattatcgaattaacgaaaagaaagtggcaacgttaactagatcttttacatgcttattatgggatttaattattcgaacaaataatgataaacattctcgttattatcaggttttaaataagaatgaagagcaacaagtatttgaagatttaatcaattatttggctaatgagcatgattttactggtttttcaaaaaaatatggttgggtgcatgcaatagcacattgttcagatgcattagcagatagcatactttgtgataattttgatcaaaaaatggtaaatgcttttttattagcggttaaagaaatgttgaataaagtcgatagacgttttattgacggggaagaatatcgtttagctgatgtatttgtaaatggtattaaagaaaataaaattaactcttatagttttattaattggataaaatcatttgcttttaatccttattcagatgaacttttagaatactatcgatttaataatctgaagtcgttgttgcaagttatatatgtaaaattaaattctatttcactgcttgatcctaatgtaaaagaaataatagagaaaaaattcaatagtaaatattaaggttcgaaattatgattatagatacgaaaaaattacaaaaagccgttattgaaaataagaaaaaacataattttaatactactgatgttaagtttgaaattcttttgttgtatggcgaagtaaatgaactgtttcaagcttggcttaaagaggaccaagaaaatatcaatgaagaattagcagatgtagccatttttctattaggaatatctgaaatgcttggtagtgatcttggtgaagatattgttaagaaaatggcgattaatgcgaaaagaaaatatgtgcatggaaagaagataattactgatgactaaagtagaacttactcgttttagaattagaaagggaaaagaagctaaagcgcaagaatggatggactttctaaatgaacatcacactgatactgtagctacaatgactggtgaaaaaatgtacgtggaaagcgtctttaaagagaaaaatccagatggatatacctatttttactggtattcagttcaaggagaaggcggaaatgccgttgaagaatcagaaagctatattgataagaaacatactgaatattgggacgaatgcattgatacggaatataagccagttgatatggagttagaagaaagtttgattgcaccggcttttgagaaggcaattgaaaaggatgcgtaatgctaaatgaaaaagattttattatcgacagttcatcatcccgatgtgtctttaaaaaatttagagtatgtttgtgaacaattacaaataatttttgatgaggtttacttaacaataagtaatgtaacatcatcagaaattaaaagtagtcttagcgaaaagtcttttcattgtcttacaattttcccaaatggtgcagcagatgctagaagaaaagttttaaagttcgcattaaaaaatgttagtggaaaagttaattatttttattgtgattttgataaagtaattgttgcactgttaaatcgaaattttgaatttaaaaattttatttcaacattaaatttaaagaatgaatatcgaattgtaggaagaaatagtaaagattttgaatcgtatccagatacatggattgaaacagaaagaattactaataaagttgctgcaaaaattttcggaattgataatgttgatttattagctggttgttgcgcgtttgatagtaatgttggaaaagtaatcgccgaaaattctacggaaatattaacggatacagaatggccattaatttgtaaagacagccaaataatagttaattataatgaagtttcatttctgccatttaattttcaatataacaaaggtagaaatgattatgactggctggggtatattccacgattaaagttggctttacaggcttttgaatcttttaagagacatatgtagattatataagtttatttttaaggagaagatttttatggaagtagatgtaaatacattttccccttatttagcagctgtcgtatttttttattccaggattggtttaagaaaattccaaaagaatggtatttatccgcagcaattattattccaattttagttatagtttttcccttgaaaatacatgctaatatcattcgacttattttagaatcattattattaatattggcttatcatgctttttcgaagaaattaagtatgcctgttactttggatatatttttattatctgattattaatggcaattttgatattttgttagaatttctgagaagaatgaaagcataacaaatagtagaggaacaatatgtactcaaatctattaccaatcacaacagccattaatccgcgtgaactagggggattaactggttttaataatcgtaaaatacagatgcatcgtctgcttagaaccggtgatcttagtaaaatgtcgtcaaaagacaggcaatttctaaaggattacggtgttgttaaaattattgacctacgttcaaaagcagaaagtatttcgcatcctgatcctcaaattgacggcgttcaaaatatttctctgcctctttccagtgaagaaggaacattaggaggagaaaacaacttaaaacaagaatcaaaattatataatgaaaatccacatgctgcatttaaaatgatgcgtgatcattatagagatcatgctattgcagcacatgatcaagaaactgttcgtcaagtattgaaaatattgtctgaaactgatgaaggagcagttatttttcactgtactgagggaaaagatcggaccggatttgttgccttatttgttttatatattttaggcgttgacttagaattaatacgacaggattatctagcgtcgaatgagattttgactgaatatcgtgcagtcagagataagaaatttcaagaagctggtaaaagtttaacttttagagctaacatgagagttttaagttcagcatctgattcactttttgacacagttcttttaactattgaaaaagaatatggagatctcgaaacatatttaaggaatgctctaaatgtaactcctgaattagaaaataaattacgcgaactttatttggaaagatgatgttatagaagcaaaagctttaggcaagaataattgatgattttatttactgaaaaaggataacctatcatcactttttctaggttttgttttattattaattatgttagatattatcaattaatttagagttaaggtgataaaatgcaaatttatactaaattaactgatcttcgtgataaaatgaatacctttcgtcccttatccaaagaagaagtagaaagtattgaaaaagataaaaaatatgatcatatttggtcatcaaatgctattgaaggaagttctttatccaagtatgaaactgctgctttattagaaactggtttaacagtacatgggaaaccgttcgcagatcatttggcagcacttgatttgagtagagcttacgattatgttcaagaattagcaattggaaaattgcctcttgatgaaattgctattcgtgatattaatcgcctagtaacttattctgataatcctactaaacgagcagaggctggtcagtatcgtcaaattaaagtatggcctaatggcgtaccagaagtacattatgcggatccaagtgatattcctaatgacatgcaaaaactaattcagtggtatcaagaagtagagggaaaagagcacccagttaaagtggctgctatgcttcatttgaagtttgttactattcatccctttagagatggaaatggtcgaactgcacgacttttaatgaattttgaattagtaaagcatggttatttgataattaatattcaaccagataagattagtcgaaatgcttatatggaagctttaaaacaagcacaaattaaggataattatgagtcatttattgaattagtggctgattatgagcaagatgaattagataagcgaatagatttgttaactaggattgaaaaagaaagaaaattcgcacaaagtcaaactagattggataagtttgataagtaattagtaagattaaagcagattcttgtatgaacctgcttttttatttattgggatgaatgtattgatacagaatataccccagtagatttgaaactggaagaaattttaactgcactagctgttaagaaaataattgaaaaataaaaaggagtaagctctcctttatgttctataagtatgatcgtgggaaccagtagaaaccaagtcgatggttaacagttctaaattgccgctatgaattttataaactaaaatccaattaccagctttattatgctcaacatgtaatgcacgtagtgaccttaaagaaccttttagttgatggtcatcatatttatcaacaagaattttaaatttttcgtcaataagtaattgaatgacattttttaatttattcaaatcataatgttttcttttaagcttcttataatctcgcttaaattgaggagtgtagttaatttgagccattagtctttatctaactcctcaaatagctcttttactgagtttgtggttttataatttcctgctttgtattcttgaagtgacctatcaatatttgatttcatcgaaggagaaatttcagaatatctatgtaaattaacaggaattgcattttcacttacgacttgagttaagatcattcgcattgcagatgaccaatcgagaccgtattcgttgaatacatctgttgcttgtttctttaaatcttctggtaatcttaaacttacggtagttgtcatatgtatcacctcaaataaaatactttatattatcattgtatcacaatttaatacaattgtattaaattgtatgctagattactttctgaagggggttatgatttagaaaataatgtaatgctaagtcaacctgatttctttaatcttggtgaaggctttgactcttttaagtgagttagttttgtagatagttttaaaatagcagagattaaaaaagatctctgcttatttttgtagttaaaaattttataagtaatctattgacatattaattatatttaagtaatatttaatttaactagagaataaaagatgaaaatggggtgagatgattgcataattatccgtttgttttacataattttgtaactggtaaacatagtgttaagttagttttacctgaaacttggcaagcgaaagatttgtttgatcaacttcaaaaaaatctagttgaattttctaaatggctagtttgggctaacaaaattgattctgttcaaaaagaagtagattcaatcaagcaatttcaacagaaaatggtcgatggtacggcatttaatttggtgattttagttgatgaaaccccagcaggtatgattgatttacattacttaagttcaaaatccggtgaagttggatattggctgtcgaatgattttcagcatttggggattatgactaagtgtgttgaatttcttaaaaaatatgcatttgaacagttgagacttgattatttaattttaagaactcatccgcagaactttgctagtcagaatgtggctaagcgaagtggatttaagtatcaagaaattgatgataatgggcataaaaaatttgtcttaagaaataatgctggtaggcgataattatggagctaaaaaggataactaatcaaaatctttgggatgttgtaaatctcaaagtcaagtcagatcaaaaagaatatattgcagataatacgattagtttgctagaagcgtatgcaactcaaaatgaaggtgaaaaggttgaaacctttgcgatttatgaaaaagataatttagttggctttgcaatgattaactttaatgtatgcaactgggaaggtgcaccaaaagttgctcgtaataattattgcttgtggcgttttatgattgatcaaaaatatcaagatcaggcattaggaatagatgcaatagtttgccttattagatatataaaaagcatgccattaggaagaggaaagaaactatatctttcttatgttcctacaaatgttgctgctgaaaaactatacaaagctgctggctttgtgcctaatggtgaaaaaattggagaagaaattgttttagttttagatttggagaatcagctctgaaactcttgacctgaagtatttttctaaaaacaaattaccaaagatttttaacaagcaacatcaactttttattgattattactttaataaagactatccatttattgattaagggagagggtatacatgaatgaaggaccatttattttagattttgacaaaaatccgcatgcggttcttgaaccaaatcatgatcaagaaccgtttcattttcatccaagattgctttacgcatttgtgccagaaaaagaaattaacgcatttttagatcaacatcttcatcgtactttaggcaaatttgaaacatgctcgtttaacccaaaaatctatgaagttcaaattgacaatgaatttttcactttgtgtcaagcacccttaggagcaccagctgctgtacaattgcttgagtggttaatcgcctatggtgtagaaaaagtcataacgtttggtactgctggagctttgaatgatttaccagaaaacgaaatgtttttagttaaaagagcacttcgtgatgagggtacgtcttttcattacatggaaccaggacagtttattgatttagatcgtgatttcttgaatcaagtagaagacgtattatctgaattaaatttaaaatatgatgaaatcactacttggacaaccgatggtttctttagagaaacgcctaaaaaggttgcgcaatttcgtcagttaggcgcatcaactgttgaaatggaatgctcagctttagcagcttgtgctaagtttaggaaagttgattttgctcaaatattatttactgctgatactttagccgacatggaaaattatgatgaacgtgattggggtagtgaatcacatcggactggcttaagcattggcgccaaaattttaacaaggatcaaataggtatggatgagaatatacaaacattttggcatcaattttgtaaaaaacataagataaatgaaaatacacccgttgaagcatgggcctttggtgcaacccaaaaagatgctaatgcgttagcttctttggtcgataaagggattaagacagctactacttcagcttatgaattgtatggtaaagatgaaaaattacctaaagtaggtgagtggagcattattttagatagtaatgctaaaccagtgtgcgtaataaaagatgtatgcgctgaaatcatctcatataatttaatttctcaagaacatgcctatcatcaaggagagggcgatcgaagctatgcttattggcgaaaggttcatgatgaattttttacacgagaatataaagagcacgggaaagttttttatcctcaggcgccgatggtttgcaaagtttttgaaaaaataaaataaaacgcagaattattacttgtataaaattagctagaaataatagatacatggtaaaattaattcgatatgctaaattaagaacgtattttagtaaggagttaactaaacatgaaaaagacgggagtaatgaactcaaatatttctagagtgattgctgacatgggacatatggattggttaggcgtgggggatgcaggaactcctgtgccagctgaaactgaaaagattgatttatcggttagaccaggcttgccatcatttattgatgttttagaagaagttcttaaagaattagaagttcagaaaatatatattgctgaagaaattaaaactgaaaatcctaagcaattagaagctattaaaaagactcttcctaacgttgagatcgaatttattcctcattcagaactaaagaaagacttaaagacatcaaaggcctttattagaactggagaggaaactccatattctaatgtaattttagagagtggcgtaactttttaattaattagaaatggaggaattagtctatgaagggaattgcccttttagttggattaggtccgctgataggatggggcttatttccaacaatagctgcaaagattggtggtaaaccggtaaatcaaattattggagcaacttttggaacttttatttttgcagtaatttataatttgatgcaaggaattgcactccctacaggttcagcgttgatttggtcaattatttcaggaattggctgggccagtgcacaaatacttactttccattcctttactttaattggttcatcgggtacgatgccgatcacaactgcttttcagttgttggggacttctctatggggtgtgtttgcactcggagattggccaagtacaaacgacaagttagttggtttccttgctttagccttaatcgtcttaggggcttggatgaccacgtggactgaaaagaagactgatgaaaacagtgccaagttgagaaaagccgtcatcgttttattaattggtgaaattggctactgggcttattcagctgctccacaagctgcaaaaattgatggttcgaaggcattcttaccacaagctattggaatgtgcttagtcgcaattttctatgcaatttatttaaaagttaagaatccaaatcaagcgattgctttagctcaaagaatttcttataaacaaattatttccggtttcttctttgcttttgctgcgttgacatacttgatttcagcacagccagatatgaacggtttggcaacaggatttattttgtcgcaaacttcagtagttttggcaaccttaactggtatttggttcttacatgaaagtaagacgaagaaagaaatgatagttactctagttggactagctattattattggtgctgcgacaatgacagtgattgtttaatttaatatgaaaaaactacagctctttatatgatgagctgtagtttttttgtggagttaaagttctagtgattgcaaatttttttatcttttttcttaaaccacactctagcaaaattgattagtggttttattttaataaccttaataaagctattgtttaatttaacttgattaaattcattaggaaagtttctttcaaaggccagtcctagatcattaaaatcatcataagaatccatatctatattttggtaatcagtccagatagtcttcccatttttatctattccagttgctgctgaacaggtttctgtttttctaccaattgttgattcagcgtaatgtagaattgtgcaagtttcataatcggttcttaaaaaaatgattttaccatcattttgatataaataatctaaaggactattcaagccatatggcatatcaagtggctgcttgttagcaatttgaactttatctttgccccaaatagcaatgggtagatagggatgacaactacgtactacatcaggtaaagttctgaagtattcaggcgtaatgcctaaaccttcgcttggagaggtatcaggattatatggaggcatattgtcacgaactaattgaatcaaatcttgtttaacaggaggatactcccaatccgctgggtcacaattagtagtgacttccgatggcatcatgatcgtgccttgatttattgtttcttctaaagcttgaactaaactttccggtccaccaggcacataataaaacttgcttaaagcagtatgaaccattaccttgtcagtagcttttatctgagcactaatgaaggtgtttttaaaatcatcttttgtggtgatcgtagtaattatgtcttgagtcataaatttctcttttcttgaatcttaataattattgactggggcgatagaatactactcttgttttgatttctgcattgttgattttgtttttcttgttactcatttataactccttgttttttagtgcttagctttcataaagataattaagctcattaatacgtattttttacggtattttgaaagttcagggaaaagttatctattatttagttaacaaaccccaaactttcatcaaatttggggacatttcttaaatatagcttaataactgaaagaaaataattcagttttaagcttaatcctaagttatttaaaataaacacctagttttcacctcgatctaacaagataaagttagtatagcatagcagaaagtactgaataaataccacttagtataaaaatataaccacttagaaaaatatgattgaaaattaaaaaaagattagtaaaattaataataaataaatcagaggaggggaaagaatgacatttaaagaattaattaaaagcaatatacctcgttcgattttaattattggattatatattctttatgccattactggtgctctgggagaatatctattcaaaaattcattgaataatatacttaaaggaaattttaatggttatatttattggacatttgttcaagcagcaatggagatcggagcagcagttttattgccaattgctacaattgctttaaccagacagtcgcagaattacttgcatcagattaggtcagatattatgaaacattactataattctagtaatgatgaaaaagtatctaaaatgcaaaatgaactaaccgacaatctaaaattattgaccactaactttctaactccttgggtttcaattttaagtggaattcttgaaatatttatttcagtcggaattctattaaagatgaactggactttggttctagttagtgcaatattattgggaatcaattttctccttccaaagattatggaaaagaaaaccgcacaagctactaaggaagttaatgctaagaatgaaaagttacttaatgtaattgaacattggcttggcggtttacaagaattaagacgtttcagcgcttatggcagattaagaaaacaacttcatcaagcaagtgatgactatactaaggcaagtaaaaagagctgcaagtataatacaatttcttatctcttcaatggttggggaaatgccttagcacaaattggattggatttctttgctggtattttattcttaaatcgctcaatttcttttggtgaatttgcagttgctggctcatttggatttgcagttttctcagctatttgggaaattactagtgcaatcacacaaatcaagtcaacaaaagaattacgtcaagaaatttctgaactacgtcgcaatgaaaagcggacggttaaagcaagtgcatatggtgtttcagtaaaagatctgaaaatttcatatgatcaaggtgaaactatttcttatcctgattttacaattaaagctggagaaaaagtgttactgactggtgactcaggaacaggtaaatctaccttgtttaaagtcttacttggaaagttgaaggcacaaagcggaactattacttacctagataaaaataatcaaccacttgagaatgctacagtaggttatttgccccaagatccaatagtttttccagtttcaattaaagaaaatattacgatgtttactaaaaagcttgaacaacaagtacttaatgtagttaacaaagttcagctaagcattgatttagctaagatgcctgctgggatcaatacagttgttgatttaaaaaatgaaaacttatcaggtggacaaagacaaaaagtggttttggcaagaagtgaaattcatcagcaaccatttgttttgatggacgaagtaactagtgcgattgatcaaaaagccactgaaaaaattgttgatggattgctaaagacagatcaaacagttttaatgattgctcataattttacaccagaattgaaggctaagtttgatcatgaaataaaactagaaaagaagggaggacacaggtaatgaattttagggaattaataaaaattaaaccagctaggttttggttgtttgtcgtaattactgtcttaacgccaatcgcgataattggtaatacagcactagttcaattagaaacgacaattgttctgtcacgtaatttacgtaattttgtaattatttcagcaataagcttagtggttgctgctttaagctatgtatttataaatgtcagtcaatatttgattacttatcaagcacaagacttaaataattcagttagagataagattgttaagcactacttttatgatggcaaaaaacatcaagttcctgaaatgcaaaatagactaactaatgacttacaaatggttaatgaaaactacattggtgctatttttaatttactgtatggtagtgttatgattatttcaattatcatatatttaattatgttaaattggatcttattacttacgatttgcttaattgtggcaattactttagtccttccaaagctaattgagaaaccactacaaaaagcaaatcaacttatttctgataacaatcaagtttatttagatactttgaatgattggcttcagggattagagcaattaagacaatttgctgctggagcaaagttattttcagtttctcagttagcaagtaaaaaacttgaagatgcaaatgttaaacaaacaacttatactaaattgcttaatgctattactggtattgcctctgcaatttttggcttaattatctttttgttgtcgggtcttttagttaagaatggtttattagagattagtgcacttttagttgttggtaatttcagattttatttaaatcaagctattaatcagatttccaatgcccgtggtcaaatgaaaggaattaaaaaactagttaaggaaatagatgaatctgcagcacctgtaagtcattcacgtaaaaccagttctgttgctcctgcaacgattaaaacagaatcattgggattaaaatttccaaatggagaaagtttaacttatcctgatcttcagattaagcaaggggaaaagatcttattaactggtgattctggtgcgggaaagtcaactttgtttaagctaattcttggtgaattaaaaccaagcaagggaagggtaatctttgaagataagaatggaaaagaaattactccggatttaagaaaaattggatatcttccacaagatccagtagtttttccagcttcaattttagataatattacgatgtttaatgacaaattagataataaagtagctgaggctgtgaaagaagtaaatctttccggggatctaaagagatttgataagggaatagataaggaacttaacttagataaattgaatatttctggtgggcaaagacagaagatagttttggctcgtgctaaggttcacgatagtgatattattttgatcgatgaaggaacaagtgcaattgatcaaaaagcaacaatggatattttgaataatttattaaagagtaaggcaaccattgtttttattgcacataattttaatgaaaagatgcatgatctatttgatcgagaaattcacttagtaaaagaataaaagaaaaaagcttttgtaaaatgcaaaagcttttttcgatgctttcaaaaaatggttgcacaatgcagtcattaaagaaaatagcttaattataaatttgtcgagtaaaattatataaatcggtatcaagataatacttaacttcatctgcttcagcaatatcctttaatccaaatagggcagttaggagacgtaattcgtatttaagattttgaattgcgacaatcaaggattcggtatcctgactagcaaactgtaagaaataattggcaatcccaacatattgtgcacctaaaactaaggacttgaaaatatctaaagcattggtaataccacctgcagcaataatcgtcttattaaccggaatggttcgtgcagcaagcagagttttaactgttgaaagaccaatgtcttctaaaaacattagtttttggttttttcgtctttcattttcaatctgagcaaaatttgttccaccactaccacctaagtcaataattgaaaagtcattgatcaagagagtccgcaaagattcggggtcaattcccattcccacttctttaataataatcggaacatcgactgtttgacgaattgccttcagattatcaagccaatgaaaatctcggtctccttcaggcatcacagcttcttgaacactattaaggtgaatttgaagggcgttggcatctaatgcatcgacaattttttgagccactttaggattagtagttggattaacattagcaaaaagtagaccatcaggattttcttgccgagcaatttcaaaactttttatttgatcaatttctttttcaagaatgctagcagaacctaaggccatgggaatattctctttagctgctgctttagcgaggcgtcgattaattgtatatgaagcatctgagccacctgtcattgcattgataaaaaatggagcactgatcttttggccaaacatttctgttgtaatgctttcttttcttactgcgctttcaggcagagcagggcgaattagatgtatatgattaaaatcattatttttattactattaaaaaacatcttagccaatgctagatgttcttcttttctttgggatctttgtgacataattgtttcctagtattaaattaattaagcaattgaatgaactaaaaagtttagtggcataattccattttcacgccaaatatttttcatttcttcaatatcagtttgttcatctgcaatcacaatgccgcaatcaccatttcctgcaccagaagtcttagcagcaccattaaattgctcggcaatattaattaatttcgttagacgtggaatttcgatagcaatatgattaagcgtagcgaaatcctttaacaattgacgatttaggcgaatttgtttttgaattaaagcaatattcttttcattaaaccctgtaatcatatcaagaacgcattgtctggattgctctaagaaagtatcatattgggttttaataaatttctttttagcattagtcttatcaactaattgtgaagttgaagcaggtttttggctccaaccaattactaaatttaatccttcaggaggagttaataattgaatttttagacccggccaagcttcatttaaaacttcactaagagacttagtagctaattctttcttaagccatactttgtcaaaagtttgataagcaagccatccaccatagacactggcggcaatatcaccagctgagccgtttccttgaacactatagtgagagatagctgaaagcttaaagataagatctttagtacaatgtaagccataaaaattaagaattgcctttacagttgcaactgtaacagctgcagatgaaccaagaccatacttcttaccatcagctgagtcaagatcagaattaacatgtaagtcgtataaagacattggaactttttgttctaagcaaaaacgttctgtaaatttaatcgcagataaaatatattcaaacgggttatcacgattatcgattaccatttgattgcctttacgaatccagtgaatagaatcttgagaatactgcttagagtgaattaaaccactagtgccagtgctcttagcaatagatacacgtacaaattcatttactgcaactaaaatggcagggcagttttgctcaagaactgcatactctcccgcaatatacaattttcctggtgcttgttctgtaatcaacgaatattcctctaatctttttattttcaaattactaaagcagagtaacgcctgggccgaaactcgcaacgactattttaacattagtcaatgatttctgaacagctgaaataatttcttttctatttcttaaggtacagagaatttttacatttggaccagcatcgattgtatagtagcattcaatgccttgttttcttaaatcttctactaatttaatcgctttgattgtttcgggctcaaaatatgtgaacggctcattagctgttaagttgcaagcatgcatttcattagcgcttaattcgctgagcttgccaattttagtaaaatctttttccttaatcgcttgttttagttcagcaatttcttgtttatttctagctaaccaaggctgatagaaaggagaagtttgagctaatttcatccctttcgttgaagaaattttcttttgttttgtatcaacttcaagtgctaagagtgacagatcaagatctggattttcatcaattggaatagcataggaacttgcatcatcaattcctttttgccattcgacaaagcctccataaatcgatctggttgctgatcctgagccaagacgagctaatctcgaaagatcttttcttgaaagatctaagtcatagcttgcagcaaaacttgttgccaaagctgcaaaggctgatgctgacgaagcaagtccggcagaagttggaacgtggttagtagacttgattataaaatgatcattaaagccaaatttttcttgtaataaatgaatataattaaagacgcgtttactttcttcaggtccttgctcttgatcatttaaaataaatgtatcttcagttaatgaagaatcatgttcaaaagtagtatcagtataaaaagcatctaaggtcattgatagactagacatgagtggggttttcagggcttgattcgcttttccccagtatttgattagcgcaatgttagtatgcgcacgagcagtttttttcattagatttcctcaatccagtaattatcaaagtttgcttgggacttttgcgcaattttttgtgcagttgcttggttaggacatagggcaatcacaattccgccaaggccgccgccagatagcttagtccctaaggctccattgtcgttagcaattttacaaatattatcaattttttcagttgaaagatcgaatgaggctaaaatgctttgagcttcattaaaaatcttgccaatttcttcagcattttgcttgagccaattctcttgagtcgcagtagcaagctcaccaagacgagcaatttgtttctttttaagatcactttcatccatttgctttttaactgcttgcaccgcaactttggtatttcccagctcgccagtatccataattaagagggtagcgcctaatttttgagaaagttgttgtggaccatcttgtttattaaagaagactagataatctgaactaacggtagctgcatcaagaccagaagctttaccgtggttaatcatttccgcatgattagtaatttccatgatctcatcgtggtccaaatttaagtttaagaattgtgataaagctttagttgtaccaagagctacaacagcacttgaacctaagccacgttcaattggaatttctccgctgtaagtaatcttaacgtcaggcgcatcagcaactttagccaacatagttttgacaatgtacttaatgccatcatattcatctggtgcaacaaaaaaagcaccgtggtagtgatttgtatccatccatgtaggaccagcagtttcttcaacagttgtgctgatatttaaggcttggattggtaaagcaagtgcattatatccatacacaacagaatgttcaccaattagaatcacttttccatgtgctttaacttctacttttttattcacgattatcgttcctatattataaatttcattaagtctatatcgtttgtccatatgctaaaatatttgctaaggagactagagacttatgattaatgtaattactggtagacaagtagacaacttgcaaaatgagattatcgatcaagctgttaagtcatattaccaagataaaacgcacgatgtttttattatcgtgccaaaccatattaagtttaccacagaagtacgagcacttagcaagctctctgttttaacaaataaaaaacaagtagcagttaataaactccatattctttctttttcaagactagcctggtattttttgaaagatgaagcaatcaaattaccgcaaattctggatgatgccgctagtgtgatgctacttgaacaaattgttaaggatcatcaggacgaattaaaactatttcaaaataaaaatcaaattacgtctggtgctttaaggcaaatgtatgaagcgattttatcggttcgggctggaaatattgacttagaaaacattgataatgaaaaattaaatgaagaaaccagctataaagtccatgatttgcaaattatctatgatgattttattgatcgtctatctgaaaaatttgcaactaaagatgagatgcagctcttgcttaatgagtttttagctaaaagcgatagtttaagcacgatggtattttacttctccgatttttcgcatttttccttgcaagaattaacttcagtacgcttaatttcaaaaaaagctaagaatacgactttggcgtttaagacaaaaattggcaaaatagatagtaaagcggaacaaggagactatgattatgtggttcaaagaacaattagacaactagagcatttttggcaaaatcagcaattaaattatcaaactactgaatttccacttactaaaactaatcctatctccctattaaatggagtttggaccaagacaaatggttttgatgaaagtttaagtaagtttttgcagccagttaaagcagattctagatatgccgaagcatattttgttgcgcggacaatctaccagcaagttgctttaaacaattatcgttatcaagactttttagttttagcgccaaatctaaatgaatatgaaacttacttaacgccaattttgcgtcaaaataatattcctttcttcaatgacctgcaaaaagagatgaagtatcatcccttagtcgttgcggtagaaaatctccagcaaatttttaagcggggttttcaaacagataatgtaattgctctaatgaaaacgcagctttttattcccgaatggtataaaagcgtagcgcgttatcaaaatgatgtagatttacttgaaaactttgtgttggcacatggtattaagggagaactttggaaaaaacctttaaaaagttttgtggatgcggaagtaattgcacttgataagtcagagcaagaggtagaagaacttgaccgtttgcgtaaatactttattagtattctaagtgaattttttgaagatatagaaacagaaaaagatccgcaagctggagtgacgattttttggaacttcttaattaaaaatcgagttgcaaaaagactagaggcttggcgaaaggaagcaaatgatgctggcgacttacagttagcgcagcaacctgaacaagtttggtcaaccttaaacgatttgttaaaggactacttattagtagctaaggaattttctttagaacaattttttgatctcttaattagcggatttagtgaggctaatttttcacaaattccatctactcttgatgcagttaatatctctgaaatgggaatggttcaaggacaaggttataagcaagtatttattattggggcaacaagtagtaatttgccgcagattgaaaaaattccaggtttctttagttcagaaaacttagaacaactaaatgatggaaataatgctagtggctatttagaagatcagcaaaaaattaataatctagatcagaattatcaatttggtaatgcactaagtttagctagtgataagatttatatttcttatcctgtaattaatacggcaaatgaacaattagaaccatctatcttttataaacaacttctcaggttaactcaggcaaatgaattttcacagcatgatttacctagttctgctggcgatcttttaacttttatgactaatccggaagctagtctaggttacttaacttatttaaagggcaaacaagaagttaatgtagattctatcttggagttgactgagcaagaaataggcgaagtagctcaaaatgtgcttgaaggaagtaattttaagaatgttcctgagaatctccctcccaaattggcccaagaactatacggagatcggatagagacttcagtttcacaacttgagacctattaccagaattcttttgaatatttcttaaattatgggcttcatttaaagaagaggtttgaaaatgagcttgatgtaattcaagcaggtaattattatcacgaaacttttgactatttagttaaaaaaattaaggaaaaaaacttggattttgctgatttaactgacagtaagttaaatcagctactaattgaagtacgagaagaattaaaagaaaaggggagatatcgtcagcttttaaacgatccattcaataaatatttgttccataagctagaccaaactacatctaatgttgcccattattggcatagtaatgtaaataaaacaacttttagaccacaatattcggaattaagtttcggcaaaaatcaaaaagtgacagggctatcttatagctggaaagatgaaaataatcaaaagaagattgttgatctacgaggaaaaatggatcgagttgatctggctaaggtgaatgatcgagttttaggagaggtaattgactataagtcttctgcgaagaaatttgacttaggcctctttgccaatgggatttcaatgcagatgatttcttatttggaagtcttaaaaaagaataataagttttttgctcaaggtaaaaacttagatgttttaggagctttttatcaaaatattactagcagcttggaacgcttaagtagtgataagatgattctaagtaactatcaaattaaggatcttctcaaagaaagcacaaagaagctaatgtataacggaattttagttgccgatgaagagattctggacctaattgaaccaggaatggagaaagatcgagctacttcggaaatatatagcagcattaaaagaaaggttaatggtgatattagctggccacgaaatcagagctttacccctgatcaactagaattgctgttagcatataactcttacttaatcaagaatgctggaagtgaaatcttatcaggtaagattaaacttgatccatatacttatggacaacaaagttccttaacttattctgactttaaagatattttcttctttgatgctatgttaaaagaaaataattaccataagattaaagcaattgataagaagacgcttttaaacttaattaaagaaaaactggatttggatggtgacgaataggtgacaaattttactaaagaacaagatcaggcaattaatgatgccggaaaagatatcttagtttctgcatctgctggttcaggtaagactaccgttttagttgagcgagttttaaaaaagattctgtcgggtacaccagtctcatctttactgattattactttcactaaggccgcagcacgtgaaatgaaagaacgaatcaaacaaaagataagcgatcaacttgaaattgaacctgataatcaatttttacgtagtcaattattagatgtcgatacagctaatatttctacgattgactctttttgtttagatgtaattagacgtttttactatgtaattgaccttgatccgcaatttagtgttttaactgatgaaactcaggcagaacttttgaaagagcgcgccttgcgtgagatagaggcagattatcttgaaggagataatcaagactttcaagatttttatgataatttctcaggggatcgggatgcagaaggcgctcgcaacttgctcttgcaactgtataatacagcaacgaccgaaccaaactatgagaagtttctcgataatctgccgacttgctatgaagtaggcgataatttaattcgatctaatttgtggcagcagcaaataaagcctcttttacttaaagaaatatccgatttaaaagcagaagtagaagctctgcttgctgaaccagaaataaatagttctgatttagttaaagttaaagagaattatgacattttttctaatcgtttagatagcttttgggaatctttaaatactgaccaaccgtacaacgaaattcgtgctaatttaatgaattgtaaatttgaaaaagcagtccgaaagtctaaaaaatggtcagatgaaagcattgaagtatatcaagatagtcaagatttaaaattagacttgaacgatcaacttaaaaagatttttgctagcttttttgtggttgaagaaaaagagcaaatagcagttttgcaaaagtcagaaaagatagttaaaacaattgttgcagctgagaaaaaattgattcaaaaattcagtcaattaaaacgtgagcaaaatttgattgactatagcgatatggagcaatttgcttttagtattttgacgacagatacttcaaatgcacatattgcacaagaatattatcaagaaaaatttaacgagatcttgattgatgaatatcaagatgtgaacgcacttcaagaaaatatcattaaagccattaaaaagaaggggcagaacacgctttttatggttggggatgtcaagcagtcaatttatggctttaggcaagcacggccagacctctttttgagtaagtatcatacttatggtaaagataatgatagtgaaaaaatcatcctagctgataattttagatcaaccaaaagggtcaccaaaacagttaatgacttatttaatccaattttgacaactaattttggtggtattgattataaaaaagaaggccaattacagttcggagctagctattatccatcagatttgccgacagcaagtgaatatatttttaccgataaaaaacaaacccagtcggcttatgaagatcaatatggcgatgaaatggattttagcgaagttcagatggtaattgcgagaattaagcaattaaaagcagaaaattttcaagtttgggatcgcagaacgcagcttaaaaggccacttgagtattcagatattgcaattattacaagaactagaagtgataacttgcaggtaatgcaagaatttgccaaagctgatttacctttatttgttactgatgcgcaaaattattttcaaacttttgagttgattatgattatgaattacttaaggttgattgataaccctcagcaagatattcctctagtagctgtaatgagatcacccctatttaacttcaaagaaccagaacttgcacaaattcgcgttaaaactccagctggcaatttttatactgcgcttactagctttgcatcagttaattcgtctctaggaaagaaatgtaaagaatttttacagcagcttgaaactcttcgctcatttgctgctacgcaccgaatttctgagttgatctggagtatttacgaaaaaacacatcttttagaaattgtcactggtttaccaaatgggcaacaacgtagagttaatcttgaatctttgtatgaacgggcaacttcgtatgaaagtgcaggttttaaaggcttgtatcaattcattagttttattgagcgaatgagaaagaatcaaaaagatttagctcaacctctcttaagcgataaagcagataatgcagtgaaattaatgactattcatgcttctaagggactagagtttcccatagtatttgtaatgggattaggacatcagtatcagactagagacttaagtggaaatttcacaattagtcagaatgaattaggtttaacgataaaagaaaaaaattatcgtattgattctttagttaaatcattagctgatgttcaaaaaagacaacaaatgcttgaagaagaagcaagaattttatatgttggcttaactagagcacagcagaaattgatcttagtggcaagcgtgaacgaaattgaaaacaaacgaaaaaaatgggtgagtgagcttgatcaaaagaaagatataattccattagttaaaaagattaatgctcaatcaccgcttgattttttaggaccaaagctagagcaaaaacatgaatttgatcaaactattcgagatatgacctctgctttagaagaacaagataagctctattatttaaaattcaatcttgacttggagcctgagaaaattaaagatcaaaatgaggatagccaagaagtaaattctaacgtaaacaaggtagttaaagaattgtacaactttaagtatccatttgaagatgctactaagactacagcttatcagtctgtatctgaaattaaaaaagcctttaatgatccaatagatacagagcttgaaaactctcgtcttatatcttcaagtaatcgttatttacaaccaattgatgaaacaccaacctttttagagggacaaaaatttactggtgctgaaatagggacggcaatgcacttagttttgcaatattataattatgaaggtaataaagaccaagaaaatttagatcaagaaatcgatcagctcgttgaattaggaaaactgaattctttaatggttccgcatttgtctaaagaagctttaaattggtttgtaatgagtgattttgctaaagaattttggaagcaaccggataaattacatagagaaagccaattttcaagtctcgttaatgctagtgaattatttaatgacttttctgatccatctgcgaaggttttagttcatggaacggtggatggatattttgaagcaaaagatggtcttattttattcgattacaaaactgattttgtcgataaaacaaacgaagaacaagcaattgaaaaaattaagcaaaaatataccggacagctacggctatatgaacaagctctaaatgaaatgaataatgataagaaggttattggaaaatatttgattttgcttgacgcaaggaaagtggtcccagtagactagaaacagaatagaagggagattattatgaaaaaagcctttacagatgatgtttttgcggtcgtcgatcttgaaactacaggcacgcagcgtaatcaaggcgatcatattattcaatttggttgtgcaatcatcaaaaagcgtaaggtagtcaaaacatattcattcttaatcaatcctcatcgtgaaatccctcaagctgttgaaaatttaactcatattagtaatagagatgttgctcaagcacgcgattttaattactatgctcctaaaattcgaaaaatcttagagaatacaatttttgttgcacataatgttaattttgatcttccttttctgaactatgaattagtaaatgctggcttagagccattaacaggaaaggcaattgatacagttgaattagctcaaattgcttttccaacttttccatcctacaaattacgtgacttaactgctcgtttaaaaattaagcatttaaatccgcaccgcgctgattcagatgctttagtaacagctaaattactgctaaaagttattaaaaaacttgaagctcttcctcaggcaacgttaaatactttaacttctttatctaaaggattattgcgagatactgattatattttttatgaaataggacaagttgctcgtcaaacaaagagaccattagacaaagatttaattcaagtaaagcatttaattcttaagaaacaaattgtacctttgcgtcatattggagccgtaagcaaaggcgagtttcctcaaagtgatgaggagaagaagaaactatttaagaaaaatttgcgttttagacgtggtcaagtaagtttaattaatcgactgcatgaatttgtctatagtgatacggacaactcgttagtagttgaagcgccaaatggaagtggaaaaacttttagctatttaatggcttatgcgtatgagctttattcaggtagaaaattggttgtagcaacgcctacgaaggtcttgcaagaacaaatattgaaacaagagataccgcagcttctaagagtaactcatttagatttagatgctcagattgttaagtcaagtagtcactatttagatttagatggtttctataattcactatatcaaactgataatgctatccagcaaactctgattttacaaatgggaattttgatttggctcactgaaactgaaactggtgatttagatgaactgcagttaactaattatcaagcgccattatttgcggcaattgagcatcccggggatgcaagaattggaactgcatttgcagattacgatttttggaatcttgctcgaagcagacaagagcaagctgatattttaattacgaatcatgcttatttagcaaaccattatatggactcaatttggggacaaaatccatttttagttgttgatgaggcacatcgttttgttgaaaacgtggcaagttcaagaaatgattcgctgcagtttgaaagcttttggggtatgtgtagccatttgcgcaacttgcttttttatgcagaagacagtgcaaaagttagattcggtaataatatcgagtttaagataattttggataaacttgagaaaaatactacggatttaattcattcgataaacaaagttcagcaagccctttatgataatcgaaattttgctacaagtcgggaagaaagaagacagaatgcaattagtttaggctttcaaggacaggatttatttagaaatgttcctcagtttaaacagttgttaagtcaaatgcaggataatattgaaattgttcgtcaagaaacaaatcaattattatttcttttatatcatcagcaaaagaatcttttgactagtgatgatgttttaataagggacttgcaagaagagatagaccatcttgactattattcagagcagaattatcttttattggatcaactaagcgaaccgcagaagttagatcacgaaggatttgttttggaaatcagtaacgaagatgatcctttatcaactaatttaacttggttaatgcttgatcctgaagaagaagtgcaacaactatatcaatattttgataaaaaattgtttatttcagctactttagcgcagcaagataatttttcatatacaatcaaaaatctatatttagatcctaaaaaaacgctaacttatcgtgctaagccgtcttttaaggtggagaagcatttaaaagtttatgctctctctgataacgatgcgcctgaagatccaaatagtcccgaatatgaggagtttattagtaatttgcttacacagattaagaattacaatcatattttggttttgtttacaaatttagatgttattcgtgatgtctttagtaagttaagtgaaagtaataatttaaaagattatgaaattttagctcaaggattaactggttcaaatgaaaaaattgctaaacgttttggaattgctgaaaaagccgttttgcttggggctaatagtttctgggaaggaatcgacttcaagcataacggggtagacttggcaattgttacgcgcttaccgtttgaatctcctgatcaaccagaagtaaagttgcgaacagaatgtttaaaaaagcaggttggtgctgataagatttttgaagttgatacactgccgcgagctattttacgctttagacagggctgtggtcgcttaatcagaaatgaacgtgatcatggcatctttataattttagatcaacgtgtttggaataaatcttatggtgaacagtttttagctggccttcctgtgagtgcaaaaaaggtcagcaaacaacaactactaaatgttttaaggaatagtaagcagaatgaataaatatgtaaaaaaagggcttaaaattactggaattggggtcggagttattgcagtaatatacttatgtttgtgttttgtattttactttgcaactaagccggcaagtgataaagcaaaacaaactaatgaaattgcacttgaaaaaacaccaattactacaatcaccaaaaattatcatttgagtcgaagtgtagaaagtaacagtttagccgggactagtaagaagggaaagaagtattacttcatctatttgccaaaaagcaaaaaagcttacctttatcaagcaaataaaggaaaaagcgaagaacaaatcctaaagatttttaatagtgctcatcctggacatgataatcttaaatgtcagttaggttggtataaagggatgccagtctgggaagtgacttatcataagaaaaatggcaattacggctatgtcctttataactttaaaagcggaaaagaattagcttatgcggacaatttgtaaatttgttaaactaataggcaattttttagtataataaaattaaatttaattaaaaaggttggtaagtaatgacagaattaatctcaattaaagattcttctaaacatgtagaccaaaaagttaagatgcatgtttggttaactgataaacgatcaagtggtaagattatcttcttgcaattacgtgatggaactgcatttttccaaggtgttgttcgtaagaatgatgtttctgaagaagtttttgaagcagctaagtctttacgtcaagaagctagtttttatattactggtactgttcacgaagataagcgttctcacttcggttatgaaattcaaatctcagatttagaaattgtttctaataacgagggctacccaatcggtaacaaggaacatggtgttgatttcttacttgataaccgtcacttatggttaagatctaaacgcccatttgctattatgcaaattagaaatactatgtttaaagctactgttgacttctttgaaaaagagggctttatcaagtttgacgcgcctattttcatgcattcagctccagaaggtactacacaattattccatgtagaatactttaacaatgacgcatacttgtcacaatctggtcaattatacggtgaagctggcgctatggcttacggcaagatctttacttttggtccaacttttagagcagaagaatctaaaggccgtcgtcatatgacagaattttggatgatggaaccagaaatggcatggatgcatcaagatgaatctttagatattcaagaaagatacttagcatatatggttaagcaagttcttgaaaacaatgaatatgaattgagaatcttgggtagagatcctgaaaaattacgtccaactactgaaggtaactttactcgtcttccttacgatgatgctattaaaatgcttcaagaagctggtcgtgatattaaatggggtgacgactttggtgctccagatgaaggatatatttcagaacaatttgatcgtccagtcttcatcgttaactatcccaccacaattaagcctttctatatgaagaagaatcctgataatcctaaagaatacttatgtgctgacgtaattgcgccagaaggatacggtgaaatttttggtggttctgaacgtgaaggaaactacgaaattttgaaaaagcaaattgaagaagcaggactaaacttagaagattaccaatggtaccttgacttacgtaaatttggtggtgttcctcactctggctttggtatgggatttgaacgtacgattgcttggatttgtaagttagatcatattcgtgaagctattccattcccaagattaattaacagaatgcaaccataatcgataatttaatataatataaaaagttgaactattttagttcagctttttttgaaaggaaaagtgtatggcgtcttttgcggctatccaaaatgaaggctttacagtcatttctaatagtctcttacgttactatccctctttaaaaatatctgaaattgaagcaatgcttttattgcaattagaatcattcaaacaagcaaataattttttcccaagtgataatgatttatcaggaagaatgaatttgtcgccagtcgaagtttcgcagctaattcaggatttaattgataaaaaactgcttgaattagggcaaaagagagatagtgaaggtcgaattacaaatttttatgatctcaagcctttatatcaaaaattagacacaattattgatgaaagagatacgaatgcttacgatgaagtttactcaggagaaggaacaaaaaaaagagaatcagtaaatccactgcaagaattagtaagacaattcgagattgaatttggacgccttttaagtccaattgaaaagcaagaaattgctgcttggcttaatatagatcattacaatccagaaatagttaaattggctctgcgtgaagcaattttagcgcaggtatataattttaagtatgttgatcgaattttactaaattggcaacgacacggtcttacaactacagaccaaattaaaaacttccttcaacgaaattaggtgattaaatggaaaaattattgtcagacgaagaagctcgattagttttaaaaagaattttgtctctttatccggatgcaaaaggagaacttcactgggatacaaagtttcatttgctttgtgcggttttaatgagtgcacaaactactgataagatggttaataaaacaacacctaaattttttagtgactatcctgatagtgctagtttagcccaagctagtattaaagatatcgaagcacatattcacacgattggtttgtatcgtacaaaggctaagcatttaaaggaaacagcacagattattacagataagtttaatggtgaaattcccaaggataaaaagactttaatgacactaccaggagtaggtgagaaaacggctaatgttgttttggcagaaggttttaaaatacctgcaattgcagttgatactcatgtatctcggatttctaaaagatttaaaatagtgggagaaaaagctactccgcatgaggtagaacaacgtcttgaagagttactgccaaaagaagaatggattcgtacacatcatgcaatgattttatttggtcgatatacaatgccagctagaactaaagatcaagatccttattcttttttaccacctttaaagtgatttttgaattaaaatatatgcaaaaaagctccagaagtcatatttgatatgattcttctggagcttttgtttaatttcaataattaatgattattattggaattatttccctgattttgttgttgattttgattattttggttatttgtattttgttgggaattgttattttgattgttagatttattttccgtctgctgattattgttttgattctggttatttgaattattgttattagaagtagatgactgcttttgacttgatgattgttgttcagcatgacttgatgaagagctactttgagaatgagattgccccttagatgatgtatcatcttccgtatcaaatcttgtgtcaacgtcgtcatcttcatctttccgtttatcgacggttacttcactgtaaggatttttgggtgcatgacctttgacaaataattgccagcttgaattgcttgcagtaggagaaactactttatcttgggtaccatttgcaatcctgcgtctaacaactgtgcttggctttgtccaatctttattagctttgtctgtcatgagataagacatcatttgcttatatagaagttgagctgaagaagagccaacgcctgatggggtaccatctttcaaattatcatatccagtccaaatccccattgaataaagtttagtgtaaccaacaaaccatgaatcttttggcgaattcttgtattgaggatattttaccaattcttcatctgaatatttaacagtaccagttttacccgcttcatataagtttttaattcgagcttgtgtaccagaacctttagttaacacacccttaagcatatcagtcatgatatatgctgttgattccttcatgactctagtaccactgctatcataatttctagttaaaccatctggcgtttcaattttagaaacaaattgtggcttatggtaaacaccattattagcaaaggcaccaaaagctcctgccatttgaagagaagaagcattagccccgattgcgactgataagccagaatcagaaggaacgttaacgccgagttttcttgcaaagagtgatgcacgtgcaaccccaaccttacttaaggttttaactgcaggaacgtttcttgattgttctagagcatgacgcatagtcattttgccttcgtatttattatcccagtcataaagttgaatattagtaccagggtaaacatacttagaatcatctaatatatgagaagttggccagttaagatattcaattgctggaccatagtctaataccggtttaacagtggatccagttgaacggccagtttgaacagcgcggtttaaacctaattgaacagaggggagcttgcgtccgccaataatggcaataacatgtccagttcttggatcaataattgttgcaccaacttgcatcttatcgttagtaaatggaaccgatccattgtttactagatcataaagtttttgttgagcatcttgatcaatattaacagtaatctttaagttgtcattataaggattaaatcctttgcttttaacttcgctgattacttctttaatgtatggatcatcaacctttcttagttctgaagttgcattgttcttcttaggttgtaatccttgagtgattggctcattaacagcttgtgtatattgggatttagtaatcttatcgtttttaagcattgctcttaaaacaatatctcttctatacttagccttttctgggtaaacatatgggtcataggtaactggtgcattaggcatccctgcaagaagggcagtttgtgctaagtcaagatcctttagatccttgccatagtaaaaatctgctgcagtacccattccatagttaccgtaattcatgtataccttattaatatagaactctaaaatttgttctttactaaattctcgttcaactttcattgagagccatgcttcttgggcttttcttcgaagggttctttgcgaagcagcggttgaaaaaacagaaagcttaactaattgttgagtgatagttgatccaccggcagcaacgcctttacttttagcgttaactaggacagagccaacaattcgaattgggtcaagtccaattccttctttataaaaacgtctatcttcgacagagacaatagcatttttgagctctttaggaatttcatcattattgacgtaagtccttttttcagaacctaaagaaagaagaaattttccatctcgagtataaagtctactcgttccgccgctttgaagttgagcttgtgaaatgctaggagcgtctttagcgtaatacgcaaatagtcctaccccagaaacgatgattaacattgctacaataaagaaccatttaattatttgtagccaaatttttttacgcggtttaccttcggggtgaaggttagccattctagaattagttggcttttgattgttatctgccattctttttgttcctatctataaaattatctatcgcatccaagtaaggaagtgttggtcgaaatccgcttttaatttcaattgaattattaatcaactcttgaattgtcatcgaactcttatgcggtgttttccaagctttaattacaaaactcgctggagttacgaaatagcgattaagagttacaaaacggatgattgtaaaacaaatccctttttgctttaaacatctttcaagatggatgatctgatgttcatgaaagtttttcaaaggaaaagatcttttatttctcgtttctttagcttcaaaatctaaatatcgaccttgataaacgccattatagtcagttgtagatgcttgcctgaagtaagcttctttaatgactgctcgagaacgtttgggataatctactttgacaatttgaaccggagttggctttttatgaactacagcaatatcttcaagaagataatacttattagattcattaatttgttgttccaggttcattccacgatcagaaaatacgacatctttgcgatgcttttgttttcttggatgcagaaggtcagtttgatctttagtataatgtgttaaactgcctgttggatattttaccatcaacatcactcctgtttagcattatagcaaagattttaaatcatttttagagaaagaaaggatcatcaatgaagcgtctatgggttactggatatcgttcatatgaattaagtatctttagtgataaggatcctaagttaactgtaattaaatatgctttaactaattattttaaaagtttacttgaagaaggaaaaattgactggataattagtggcgcaaatttaggaattgaacaatgggcgctggaggcggcaattcaacttcagaatgaatatagcgttcacacggctttgatgacgccttacttagaattttctaaaagatggaatgaaaataatcagatgaagtatcaaaatttaaccgaacaagttgacttcaccgcttcaacttcaaattatccatatatgagtccagcgcaattaaaaaattatcaaagtttcatgttggaacataccgaccgtgcagttttaatttatgatcctgaacatcctggtaagcctaaatatgattacgaggccatccaaaaatatcaagaggggcatgagtacccagtagatataattgatttttatgatttacaagaatcagcagaagagtatgaagaaaatcatcgacaagaaaataatttttattagattttaaaagtaaattttttagcttatataagactaatttaataagaaattttttgaaactgtcaaattttttgtgtaaatagatctttctcgtaaattgtttttttaacgttttatttattcaaaataggattctaaggtatcctggacttgaccaaagcctttgtgaattcggttgaagtagcggtcattgtagctcattgcttggatgccaataaaagtatcaagcgactgttcagtcgggaactccgctttaggcttagccttgcgcttaatgacgttattaaaggattcgatcatgttggtagagtaaattgaagccctgatctgcttaggataattataaaaaacaagcaggtctggctcgatgtctttcaggtttctaatgacacgattgtagctcttgttccatttggcataaaaagcatgcaatacatcaacagcagccgctttattggcttgctggtgaatctgcttgaattcgttcatgattgcctcgcgatcgtccacgcgtactttagcgcagatgttgcgcataacatggaccaagcagcgttggaaatgagcttgaggataggtctttgccagtgctgctttcatgccgacaacgccatctgaaaggaaaagctctacttgctttaaaccacgagatttcatgttctggagcaacgccgtccagacttcaatattctcactaggcgcaatgcagtagtcgataacttccttgtgaccattaggcttgatgccaatggcaatatatactgcttctcgttcaaaagtttctcgacgcaacggtatatacgttgtatcaagataaacacaaaagaacttatcgctcagcttacgcttgtgataagcctcaactttaggaatcatttgcttagagatattagacacttgagctggactataatgactgccatacattttttcgatcaaattagctatttctctagtggttacacctttagaataaagctttataaccatatcttctaagagatcagtatgttgtttatagtctggcagagtgtgttgatgaaacataccattgcgatctcgtggcacttgtacctcaattgatccaaactgggtatcaattttacggaaatacgcaccatttctagaattaccagtattccagccatttctagcatagggatcatatcctaaaaaggcagtcagttcagattctaacatgtcattaacagcttgttggatttcatgacgaagcaaatcattaattttatcttgattgaatagagcttgagttatatttttggtaaaatcattcatgaaggagttcttctttctgtatgtttttttgttcaaaccaatcatacgagaaaggaactcctttttctaatgttttaggaaattaaattaaggaataattcatccttacacaaactattttacggtctcaattttttagaaacagggactattattgcttgaagaaaatttataacttatactaaatatatacgatatggtgagtgccattgagctaataactagttaacaccttatcgcctaaattaaagacagacattagtctgcaattaaggagtttgacgaaataaatggcaagtttaaatgatattcaactaaatccacaaagtattttaaaaaaacaatttagaaccaaaatgaaggggtatgattcagatgaagtagattcataccttgatacgattatttctgactatagtacttttgcgacaattattgaagatttgcagacacaaattagtgagttaaaagctcaacaaaaacaagcatcaacacaaaatactgctcctaagttagatttcaaaaatgaagaagttgaggatgatgttaagacatatactcctcataatatccagaaacctatagtaagtagcaccaatgaagaaaaagaaactcctgaattaactactaacgtagctatgattcagcggatttctactttagagcgtaaagtttacaaccttgagcaaagaatgaatcaacaagatagaacttaccaagctaattaaaactatgatataattgttattgcaaatttcgagcgatcgcggttagcttatactagctgaggaaagtccacgcacgcacaagctgagatgcttgtagtttttgtactcagcccaataagctgggggacttgtttttagcaagttacggcggaaaaagcactaaatcattttttgacatgtgtgactatcctgaaaagtgccacagtgacgaagcagcaagggaaactttgctggtggaacgaggtaaaccctgcaagcgggcaacccaaatttggtaggggcgctttcgtctaagtaaatgaactaaagacgaagtcatttttaatgaagatagatggtcgctgaagataagattcaaccaaatcttattggaacagaacgtggcttatagagatttgtaggttagggttgagctttggctcagcctttttttataaaaaaatttagtatagatagagaataaaaatgaaagaatacacattatatgcgacaatgggcgctggctttgaaagcgttgttgcaaaagagctaaacaatctaggctatgaaactaatactgaaaatgggcgtgtattttttaaaggtacacaaaaagatatcgtaaggaccaatttatggcttagaagtgcggatcgaatcaaaattttattaaaagaattcaaggcatttagttttgaccaattgtacgatgaagtttatagctatgattgggccgaattgttaccagtggatgcacaatttcctgtgaagggaagaagcgttcgcagtaaattgcattctgagcctgatgtgcaatcaattgttaaaaaagcaattgtagataagctgaccgatcaatatcgtagacgtggctttttacctgaaagtggcgctgagtatcctttagatattcatatttataaggatgtagcacggttaagtttggatacaactggtcagagtttatttaaacgtggataccgggtagaacatggtggagcacctttaaaggaaaatttcgcagctggattaattgaattaacaccatttgatggatctcatccttttattgatcccatgactggatcaggtacgattgcaatcgaagctgctctcaaagcgaaaaatgtagctccaggtatttggagaaagtttgcttttgataattttgactggtttaataagcagcttcatccagaattagtggatgaagctaaggcgcaggaaaagacagaacatgcaccaattttagcaagcgacattgatcagtcaattttagaaattgctaaggttaatgctcataatgctggcgtattacaagatattaagtttaagcaagttgctgtaaaagactttgcgactgatttggaaaatggggtaattattgctaatccaccttatggtaagcgattgaaagatcgtgaggcagctgaaaagatttatgaagaaatgggacaaactttgcgtccgctatcttcatttagtcagtattatttaacttcagatccacaatttgaaaaattctttggtgctagagctactaaaaaacgaaaattttacaatggtaatttaagaacagattattatcaatattgggcaaataagagataaaaatgttaacgcaagacaaaaaaacgagcttctgggtcattagcgatacccatctgattgcagatagtttacatgatgatggtcaagctttttctcaaatgcaaaaaactagtcaaggtaaagatctttattatcaagaaactgctcttagtgcttttgttagaatggcagaagaaaagaagcctgccgcaattattgttactggggatgtaacttttaatggggagcgagtttcagctgagagatttgctgagattttcaagcctttgactaaaactaaacttcttgttctccctggaaatcacgatatttatgatggatgggcaagagaatttcatggtaaaaagcaatattatgctgggcaaattagtcctagaatgtggcgcaatatttttagaacttcttatgaaactgcagttagtgttgatagtagttctttagcttatagtgttcagctgaatccagattatttgttaattttagcggattcaaatgattatggaaaagaagaatcagctactgccccagctacagcaggttttttaggaaaagagcaaagaaagtggattaaagagcaacttcaatatgctagtcagcataacttacgcgtgattttctgtatgcatcataatctatatgcacataatccggctgtaaataaaggttatgtagttgacgactatcgagaattacgtaagttattagctcaatataatgtgaaactagtcttttctggtcatattcatgctcaaaatatcatgccaccccaaaattcatgtccagcaatggaagttgtaaccgcaagtttttgctctaatgatcaggtctatggggtagttaaagtttctccaaaagaaattagctatacatgtcaccattttaagatgcgagactatctaactgataaagaaaagctaaattggactttaactcattttcatgactatttagaaaatattcagttagggactatttctgcagagttaatgcaaaaagacttgtatcgaaatcatgatgatttaacgagcgttcgacagatggggcgtctttttggcgaaatgaattatcatttctttactggcaagaatcatatcaattttgacgaactacagaagctaaagaagcctgaaatctatcaacgactaatttcataaaatccccaatatgagttatatttgcagactttatatgatacttctgcgcatgataacttacacgtgaaaattaagtattaaaaaagttacaaaaagtcagattaaataaaaaaggcaagtactacatgaagtttgtagtacttgctttttttaatcttcgactgcttgagaattaatatttaagagtggttgcccattcttatcaaagtaagaatctaagtcacgacaccaaatcattgccatagtatgctgaccaacgtgaactccaacaactggaccgataatactctgatcaactttaacttttggaaaacttgcttgataatcattaacccatgcagcttctcttttttcatcatcagcatgaaaaattgttagctgaattggataaagcatattagcagttaggcgattaaagtctttcttaatatgattataagcacgtttatactgtctttctttagcaattgcagaaattttaccttcgttttgaacgtccatagataagatgggtttaatttttaaaatagaacccacaaaactagcagcatttgacaaacgtccagttcgttttaagtgattaagactatctaccataaatctaacgtcagtagtatttcgtagatcttttaaatcgtgcatgattagattaatatcagcacccgctttaaccagtcgaccagctaagattgctgcatctgcttctccagcacatgtgattttacagtcaaagggatgaatattaatacgtgtttcttcatttgctacgcttaagacattactataaaaactagaaataccgcttgagagcgtaataataattaaatctgtatatccttcagcaacatacttttcaacatattttttaactgttccgattgatggctgagaagtagtcggcagggttgtagagctatttagctttttataaaattcgtgaaaaccaatatcgattaaatcgagatattctttattgtcccaaataattggaattggtagtatatcaataccatatttttcacattgttctttagttaaataagatgaactgtcagttaaaacgccgattttcataatattaatttcctccatgttcttgcttaatattatagtctagaacacaactttaaacaaaaacgtaaatctgctttatttttgttacaatagagataattaataaatagggtgtgacctaaattctaaattatgaaaaagcattttatttttttaggagctgcgggtgtaatttattactcctggctcttagcactaatttttgtagcctttattgttgggtatgaaagtaacaaggcaattagttatcctgcgcttattttaggaactatttttgtaattattgtcatttatacctggcttaattcttattttcaaaaagaggcaagtggggattggttaaaattaccataccgtcaaaaaattcagcttcaggacttaaaaattaagtggcaatggaaggcatttgacatatacgaagcaaaaggtaagcttaatacttatttgcttttagcatttaagagaaagaagaaatgaatttgaagtcagatatcgagattgctcagaatactaaagaattaccaattaaagaaattgcacaaaaaattgaccttcggccagaggagattgaactttatggcaatgataaagctaagattagctggaagggtattaattgcattaagaagaaccaaaaacttggaaagttaatcttagttacgtcaattagtcctactcctgctggtgaaggaaaatcgactattactattggtttgggggatgctattcgcaaccaactccataaaaacactttaattgctttaagagagccctcaatgggtcctgtttttggattaaagggtggagctaccggtggtggatatgcacaaatcatcccaatggaagacatcaatttgcattttacaggagatatgcatgctttaactagtgcaattgatactttagctgctttagtcgataattatatttatcaagacaatagtctagagttagatccaaatcgtattttgttaaaacgcggaattgacgttaatgatcgtactttaagaaaaatcactatcggtcaaggatcacgttttaatggaatcgaacatgaagctagctttgcaattactgtagcaaatgaattaatggctattttgtgtttagcaactgacattaatgatttaaagaagagaattggaaatattcttgttggcttttctgtcaaagatgaacctgtttatgttaaagacttagggtttgaaggagcaattgctgctttattatcaactgcattaaagcctaacctagttcaaacgcttgaacatactccggcaattgtacacgggggaccatttgcaaatatcgctcatggtgctaattcagtaattgctactaacacagccttacatttaagtgattatgttttaactgaggcaggttttggcgcagaccttggtgggcaaaagtttatggactttgtatcaaaccacttagataaacgtccagatgctgttgtagtagtagcaactgtaagagcattaaagtatcaagatgaagaaagcacagatcatttagatgaagaaaatatccctgctttagaaaagggatttgctaacttgaagcgtcatatggaaaatatggctcattatggtgttccagtaattgtcttgattaataagtttgccagtgatactgaccaggaattgaacaaattaaaagaattagttcaagatgatggctttgaatgtgaaattgtttcttaccatgatgaaggttcaaagggaggaatccaagcagctgaaaaggttgttgagttaactggtaaagctagtgactttaagcctgtttataagccagaagattctgtagaagataagatcgccaaaattgctcataagatctatcatgccaaggatattgaatattctgatacggcaaagaaacaattagcagaaattaagaagatgggcaaagatgaattaccagtgattattgctaaaacgcagtatagttttaccgataaaaagaagatccttggagctccagaagattttattctccatgttaaagatcttgcgcttaaaaatggggctggctttattgtggtagcaactggttcaattttagacatgccgggccttcctaaacatcctgctgctttagatattgatgtagacaataatggaaagatttcgggattattctaatgaagagagccaaacaagtcttatatttagtaatttctttactagtagttatcgctgatcaagggttaaaaaactatattgttactaattttaaaataggtgatgaacacactgttattcctggaattctttcgtttacgtatttacaaaatgatggagctgcttggaatatctttagcgggcaaatgattttgttttatttaattagtattgctgcaattgcggtagtagtttattatctttttaatcctaaatataaaaattggctttttgatactggcctagccctagttttagggggaattattggcaattttattgatcgattacacttaaagtatgtaattgatatgctgcaattagattttgtccagtttaatattttcaatattgctgatagtgctattacagttggaattgtccttgtttttatctatttgatatttatgagtgaaaaggattaaaggctaagagttaaatgactgagaattatcacttagtaattgaagaagaaaagggacgcttagataaagtgattgctgaaaagcttaaagatctgagccgaacaaaaattaaagagctagttaatgataaaaacatcctagttaatcataaggctgagaaagtatcctataaggtgcaagctggtgattcaattgatattactgtccctccagctaagccattatcattagaggcccaaaacttaaatcttgatattgtttatgaagacgctgatgtgattgtagttaataagccgcaaggaatggtagttcatccttcagcaggccaccctgatcatactttagttaatggtctactatatcatactcatgaattagctgatagtcctgaaggttttcgaccaggtatcgttcatcgaattgataaagatacttctggtctactaatggtagctaagaacgataaagctcgtgaaagtttagaaaagcaattagcagaaaaaataaataagagagaatatttagcaattgttcatggtaactttgaaaccaaaaatggggtcattgatgctccgattggcagaaatcccaataatcggaaacaaatggcggttaatcctaaagggaaagctgcagtgactcattttactgtgcttgagcaatttaaagactatagtttagttaaatgtattcttgaaacggggagaactcatcaaattagagttcacatgaaatatattggtcatcctttagctggagatcctttatatggacctaagaaaacattggcaggacatggtcaatttttgcatgccaaaactttaggcttttatcaaccatctacacacaaatggctagagttttctgcacccctaccagcgatttttgaaaaacaattagagaatttacgacgagaagtgaagcattgatttatgagacgatatttaattcttgaagatggcacagcattttccggacacggttttggtgcaccgattactgctacaggtgaacttgccattcaaactagtaattttggctatcagggagctatttcagatcctgctaattttggtaaaatcttagcttttacaacaccaatgattggtggtagtggtattaatgctatcgattatgagtcaatcgatccaagtgtgcgtggaataattgctaatgacattgcttttcatatttctgcaaatccaacttttcaagacttaaatgattttttaaaagaaaaaagaataccggcaatctatggtgttgatacacgggcgttagttcaaaagctaaaaaataaacaagtaatcaaagcctccattatggatactgatgatgctcatgcgtttgatcaaattaaggcgctagttctgccgaaaaataaaacagctcaaatttctactactcatccctatgctgcaccaaatgttggtaaaactgttgctgtaattgatttaggtctaaaacattcattgctacgatccctttcattacgcaaaattaatagtgttgttttaccatacaatgcatcaatatatgacattatcaatttacgagcagatgcaattgtgatttctaatggaccaggtagggtagaagaagttgcaccttttttgaagcctgtttttgataaattttatggaaaattaccaattctaggaattggattaggctttcttgccattagtaatttcttaaatttagaacttttagacttgattcctgcctataatggcagtaatttccccgttattgagcaaactaataatcgaatttggcaaactgcaatgaatattgatcagctagttgttccagatagtttatcattaaatctttcacgtaaatattttgacttgaagtcagatttattagctggttttagtattaaagacgataaagttttggcaactgcttttaatccagagggttcgccaggtaattttgacgcagccagcatttatgatcagtttttgaatatgatggagtagaatatgcctttacataatgaaattaataaagttcttgtgattggggccgggccaagtattgttggagaagttacagagttagatattttagctaaacaggctttagctgcatttgaagaaagtagtattcaagttgttctaatcaatcctaatccagcaacagtaacaactgatcctcgtccagatgtaaacgtttatctcgagccaatgacgcttccttttgtgaagcgtattattcgaatggaaaagccagatgcaattattccagcttttggaggaaagcctgccttaaggcttactaaagaattattagaatccggaattttaacccaaatgaatattgagctattaaccattaatagtttggctttaagtttgtcgacaccgcataatttttatacttttcttaagtcaaataagattgctgtagcaaatcaatggattttagaaaaagaagacgatttaagacgcatagttgaacatgcgcactttccacttcttttgtcaaaaaaacagcattatcgtccagacaatatgatttcattgagcaacctaactcaattagagcaatattttttagatgaagaaaatgacgatcattttaattggaaagattatcgattaagtgaagatctatctaattgggaagaattgatttttgatattgtccgtgataataatggcaatttttgtttcgttggcaataccggcagtttggagccggtgggtatcaattcttctgattccttactagttacgcctattttaactaggaataacaatcagatccaaagattacgaaattgttgtcgcaaaattgccaattgcctcaacttgcatggtgcattaagtattcattttgcggttaaacaaagtggtgaatcttttaattataaagtgttaagtataaagccacgtctgactcaaactagtctactttcatatagaagtggtgtttattcaatcggttatgtaactgccaaaattgcacttggatataatttaaatgaaataactgatccacagtctggtatttcagcggcagttgatccagtacaagacgcttgctttgtaaaattgccttattggtcatttactgaagcaggttataatcactatgctttaaacaataaaactacttcaggtggacaagcacttggaataggtcgcaatttcgaaagtgcatttttaaaagcgctacaatcaacaactggtttttctaataatgtaacaactttcaataaagagtgtgctaaaagtgaagaacaattgctgaaagatttaagccatcctaatgaaatgcatttagtaacacttttagcagctttagctaaaggaattagttatcacaagttatacaaacttttacatgttaatttagtatttttgcagaagtttaatcatattttgattttattaaaaaagttgcaagcggatgaactaacccctgacttattacttaaagtaaaaaagaacggtttttctaatcgcttaattgctgaaattacgggacaagaagaaaaggccattgctaatctatgtacaaaatggtcaattaagccaagctatattgaaattgatgggacagcgggattaatacatcctaatatcaaggcagtttatagtagttacggaattgaggatgaagtaaaaccattatctaattcaaaaaaatgtcttcttttagggctaaaaccatttcaagtatctttaactggggaattcgactatatgctctatcatgcagcagaaactttgaaagagcagggaattagtccagtgattattagtaataaccctgaaagtgtgagtgccgcttatgatgtatgcgaccgggtttattttgaaccaattactttagaaaatattttagacgttgcttggaaagaaaatattactgaagttgtaactcaattctctggtaaacaaattaaccagtatcggattcagcttctagaacatgggttaacgattttaggacagcctaatttgaaagagattctaaaagaagaccatgctgaagaagtatatcaatctggggttaatcctgttccagctcttcaatgtgataatgaaaaaagtatttttgcttttgtaaaagacaatggttttccagctttgatcggtggtaccagcaatggtaagaaacaaaagtccgctgttgtttttgatttacctgccttacaaagatatattgctgaaaattcattggaacatataacagtttccaagttcattgaagggaaaaaatacgaagtcacagctatttctgatggtaaaaatgttactattccaggaattattgaacatttcgaacaaactggatcacatgctagtgactcaatagctgtttatcgaccacaaaatttgtcaacaaatgatcaacgtagattacgtgatagtgcaattagcattgcaactaaattacatttaagaggaccagttaatttacattttttattagctcatgatcagatatacttattgcaaatgaagagttattcaggtcataatgtagcctttttaactaaggctttgaagagagatattactgcaattaccatgaaagttctcttggggaataaactatctgaattagaattacctagtgacatttggccatcaaataacttaattcatgtcaaaatgcctgtattttcttatttatcttatcaaagtgagaatacctttgattccaagatgaagacgtctggaagtgtaattggacgtgctaagcatttaccaacagccttatttaagggatatgaaggtagtgatttaatgatttcgacatatgggaccgtatttatttctgttaaggattctgaaaagaaaaatgcaattaaaatagctgcaaggttccatcagttaggatttaaattattagctactgaagggacagctaatgttttagctgaagaaggtattactactggaattattggaaaagtccaagagggtagcaatagtttgcttgaaaaaattaagcaacaccgcattaatttagtcattaacgttactagtttatccgattctgctagtcatgatgcaattatgattaaggatgccgctttaagtactcatattcctgtcttttctagtttacaatcggcgcaagatgtactaacagtgcttgaaaccttagcaatgactacacagccattataaaattaaatattattaattatgtaaactgatgggtatataaaaacgctcaatttatagaaaattaaatctataagttgagcgttttcttatatttttttacttaaaacgtcttgttcatcaggtgttacctcaattgaattttgaccagtatagataacgaagccgggtttagcaccatttggtttcttaatcctttttacctgaacataatctacaggaacatgacttgaagtttttccctttgaaaagtaggctgcaatttcagcagcttctttaatgtcttcatcgcttggattgctgtcttgcagtattacatgggaaccaggcatattcttaacgtggaaccaataatcacgtttgtcagacttttttaaagttaaccaatcattttgataattattttttccaactaatacttttttaccatcattcaatttgaaagtattcaaattcttttcactaattttcttcttgcgtcgacgattatgggtttgttctttcaaatatccttgattaattaattcatcacttattgcatcaatatcttgaggatcggcattatcaattgctgtttgaatagactcaaaataatctaaattttcattagctaactttatttgttcgttaacatgtttaattgaattacgtaatttttgataacgagtaaagtatttctgagcatttctagcaggagagagagcaggatcaagctttatttttaatggttgattatttttataataattgggcaaatcaatactttccataccaggttttacctcatgaagataagcattaagtaattcgcccttaatccgatatccttcagaattttcagcttgatctaattgcttgcgtaacttaataatttttttcttgagctttttaagttcattattaacgatattttcaatttttttagacttttgctttacccattcccgattcgcttgctcgtggtaaaaatcatcaagtgttttgttgatatcgtcattagagtaaatcaaatttaactcaagatgatagggaaggtaagtatatactcgatctttatgcttagtagtctgtaagatatatcctttaggtcgattaaattggttaaaaaatgtttgcagggaactataggtaaagtcatcttctagatatcctgcaaattcttttttatcatccccatctaagccgttaaattgctttacaaaatccattggttcaggatattttgtctttaaattattaaactgatctaaagataaattaaaaccgttgagtcctggtaaaagtggtggcaattcataagatgcatgcggaagtaataaacgagcccggttttcatcaggattgatcctcttaagtagatcaataatcttgttgtcatctgcattatataagatgacattactgtgccgccccattaactcaactgataaaataagctgcatttcatcgcccagctcatttcgattagaaaaatgaaaattaacaattctttctacgtcgacttgcttaatttcttgaagaatagatccttctaagtatttacgtaggaccataacaaaagtaggggcgacatcgggattagtaattgtctcagttgtaatataaaaccgcggattctgggcattcgcggaaattaataaacgttggttttttcgaacttttctaaaatttaaaactaaatcttgttcgaatggttgatagatttttgtaagttttcctccaattaaagtgggggagagattttttaagaaactatgaataaataaaccatcaaaagccataagtgtcctccttaagaatagtatatatattatactctttaatactatatatttccttgtttagtaagtacgtgattttttcacaaatattgttaaattttcacaaatcttgtgaaaactcgaattatgtcttagaattattgttgattagaaaaaatgggaaatataagcataggtggtaaataaaaatggatgtcttaatatttaatagtgttagtgaaagtattaagcgggcaattaataaaaaatgtggtttaaacctttctcaaactcgtttattgcttttctttgaccgtcatcaaaatgaaacgttgacgatgggggaattagcacaagcactaagtatatcgctttctaccttaagtagacaaattaagcagaaaaaaactgctgccttaattaaagttgagcgttcaaagaaggattctagtaaatctttgaatttgaatgctgaaggactagccaaagcccaagaattaaaggatgttttaagacaaattgaggcacaagttttttctacttggagtcaagaaaaaatccaagattttgatagtaagatgcaaatagttgttaacaacttaatggcagatgggttataaatcaacgattatatttaaaaaacatttgattttatgatataatttcattttgataagtagtattgcagcatgcaacttaatgctgctattttaattttaaggtaggttttcacacgtgaagatagcactcattacagatagtactagtgatataagcccagaagaagccaaggccaacgatattactgtagtaccaatcccagttatcattggagataagcaatatatggatgggatagatattactgcagaaaaactttttgagttagagcgcgatggagcaccttttccgaagacttcgcaacctagtccaggtactatgcttgaattatgtcaaaaattaaaagatgaaggctatgaagcaattattgctattccactaacatcaggtatatcaggcttctacaacagcttagttaacttagcacatactcatcctgagtttaacctttacccttatgatccagcaatgacagttcgttcaatgggaaacttagtacttgctgctgccaaaatgattaaaaatggttgggaacctaaagagattttagctaaacttgatgaaatcagagatacaattgatgttttatttgttgtagatgacttaaataatttagttcgtggtggtagattaagtaatgcgagcgcctttattggtactatgcttcaaattaaaccactattaacgtttaaaaaagatgattatcaaattgtaagctttgataaagtacgttcgatgaaacgtgcagtaaagaaagcagaaaacatcactattgaaagaattaataattcaccaattaaagataatatagcgttaactgtttataattcaaatgatttagagcaagctactaaggttaaagatgattttcaagccgctttccctaatatgaccatcaaaatgttcaattttagttctgtgattgccacatatttaggagagaaatctcttggtattacttggatggcagacattgataaaatggactttagtaaaaaataatcatataaaaaataggagagctagagctgctttcctattttttaataaataaagaaaaaactaaagtgagagtgaactaaagtaatgaaaaataaatttttaaaaatattaggattagttgctggtgtaggatttgcattagttatagtctttcaagtgattttagcgataaatacgaacgctattaaaaattctagtcccgcaactgttaactctgctacaagtaacagtagtgataaagaaattattgctgaagcactaaatactgattttaagagttacaaatttaaagtaaaaaattcaccaggaattgaagccactagaacttggtcaggcaaatatcaaaatgatccacttaaagcacaagctaaagtagataaaacttctatgtggctaaatgaggataaagtatatcagaagatgtgggataatactggaagtccaaaatggaaggcttcatctacaatgacgcctaacaaagtagttagccagtttgatccagctattatcttaagtggaagtaaagcaattaaaggtgatatgaagcttaaaaaaacaggttctgtttatcgtgttagctatagtggtaatagtttacgtttctggaataaaacccacaaaaagctcattaaaaaactgaaaggtaatgcttcaggtcttgataacgaaggtgcgcttaaacgacttaaagttgaatatactttaaaagaaaaaagtggacacctagttttgactagcttttcattctatttacgctttgcctatgctggttataatatctctcaagagggtacatattcagaaatcaatgcaattaaagtaagcactcctaacgcattaaaatcgaagtcttctaccaagaagagtcatagagtgtaccatccaaaagctgatgatagttttgatatcaatatagactcagaaaattcacgttcttctcaatctagtcaatcaagttcaagctcaagtagtcagcaatctagctcatcacaaagtagtaaatctgaagaacataatgatgctaagcaagagtcgcaaagtcaaagtaatacaacaagccagtcaacagacaataaagaatctaatcaacagtcgcaaaataataatacgaataatcaacaaggacaaaatcaaaataatcagcagcccgcatcaggtcagagtcattagaaatagataatttaaaaagctttgaaaaatccaatttggaatttcaaagcttttttactggactaaactagtttttcattttttatagaattacgtaataatttaagaaataaacgcgcaacgtttgatagttgaactcttgaattccaaattaaccgattatgatcaattattttgggttgaagtggaataaaacaaaggttgctctccggagaaagtgaaagtaaatctttataaattagtaggcaatatggtcctttttctactagatattgcagattatcaggtaaattaaatgtggctacgatatttaatttttgcggatcagtacaccaatctctaaagttatcagaattagctgtatgcttagaaataataagtggatatttttgaaggtcttcagggacaatatatggttgcttggcaagaggatgatctttacttacaattattccatattcattattttcaggaagtgtaaggctattaaagttttgagtcgtatcatattgtcccattgtaattccaaagtctaaaataccacgctcaattttcccttcgatcatagaagaattcccattaaaaacatgaatttttacttgatgataatttttaacaatattatttacaatatccatcacacgcttaattgcaatactttctccagctccaatatataattcaccagaaatgattttagaatgttttaaattttgttgtgtcttattagctaaagaaataatctcttcagcatgttcttgaagataataaccttcctgggttaacgtgatttcttgatgccctcggtaaaacagggtgacaccaagttcttcttctagattttttaactgtcttgataaggatggttgactaatatgaagagaatttgcagcttttgatatatttttttcttcgcaaacagccagaaagtatcttaaaacccttaactccataaatgatgcctctcatttttaatataaactatccatacttattataattaaaatagtactatacttaaattaatcttgattcttatgtctattgatcttattgagagcatctttttgttttttttgatctacgtgagtatacaagtcagtagccgtagttcctttttgccctagttgttgtgcaacgagaacttgatctttagttacttcgtacagttcactagccaaagtatggcgcaatttgtgcggggttagcggttttccaaaagcagcagaatatttattgaccattttctcaacagcattcgcagtcattcttctggtttttccatgccatctagttaaaaagaaggctatatcgtttttatttgcatgataacgatcagtacgtattttttgatatttttttaaataaggaatagtccagtcagcaattggaacactatctttttggccaccttttcgaactacatcaagcatttcatcttttaagttaatattacgaacgttgacaccaacgcattctgaaactctgattcccgtacctaaaattaatgcaataatagctatatcacgttcatgattctttttgaaagaaggtagcgactgtttattacatttatgctcgtattcattttcaataaaatctaaaaactgatattttaaatcacccatgtacatatgagattctagaacatgagcccggtaattcaacgttttagtgtcatttaatgaatcaatttttagcatgacattacgatcaaaatatggttctccatgattgttgtctgaagtaatcgttaagaatttatataaagaacgaagagcattaattgatcggttaattgtagtaggtgaatttaatcgtccttgttgattttttgtgtgcttaagataatgaatataaagcataacatcatttcgctgcatgccttctagtgttgatagttcaatttctttattggaagaagctgtagatattttattttgtctcagccaatcaaaaaaacgacgaatttctgttaaatattggtatgttgtggttaatgaatggctagtgccaagattatattcttttacaaaatcaggcatattcgccagctcttgtttaattagggttaaatatctgttagtttccaatttatagtctcctcgaacgtaggtttgtatatattatatcttatttaagtaatttagtcttgtcccctaatcttttctaagtaggagagaggggagagtcttcttcggtaagaaaaaattaataaatcataacctaaaaaatgtagaatttaacctatagacggttaggaaaaataactaaacttttcttatggaatgcacaattcaagttgatttaataattattaaattgagaagttattttaaattagttttactaattttacgataattaacgagctgattatatacttaaaagttgattgaagtagtgtttatgagctatatattactaattgaggcgttataagtttgtataaaactaaacacatttttttgaattaataggagagtaggttatttatttttcagtaaatatcaagtaaattcatgggcacattttggttactttttaggtgagattttgtcgttctcagtattttgaagacactaatcaagtgtaattactaagataaaaatagaattttataataattaaatgtaatgtataaatattgatatatcagcaaatcattgatatttagagaccgtaaaatagtttgtgtaaggatgaattattccttaatttaatttcctaaaacattagaaaaaggagttcctttctcgtatgattggtttgaacaaaaaaacatacagaaagaagaactccttcatgaatgattttaccaaaaatataactcaagctctattcaatcaagataaaattaatgatttgcttcgtcatgaaatccaacaagctgttaatgacatgttagaatctgaactgactgcctttttaggatatgatccctatgctagaaatggctggaatactggtaattctagaaatggtgcgtatttccgtaaaattgatacccagtttggatcaattgaggtacaagtgccacgagatcgcaatggtatgtttcatcaacacactctgccagactataaacaacatactgatctcttagaagatatggttataaagctttattctaaaggtgtaaccactagagaaatagctaatttgatcgaaaaaatgtatggcagtcattatagtccagctcaagtgtctaatatctctaagcaaatgattcctaaagttgaggcttatcacaagcgtaagctgagcgataagttcttttgtgtttatcttgatacaacgtatataccgttgcgtcgagaaacttttgaacgagaagcagtatatattgccattggcatcaagcctaatggtcacaaggaagttatcgactactgcattgcgcctagtgagaatattgaagtctggacggcgttgctccagaacatgaaatctcgtggtttaaagcaagtagagcttttcctttcagatggcgttgtcggcatgaaagcagcactggcaaagacctatcctcaagctcatttccaacgctgcttggtccatgttatgcgcaacatctgcgctaaagtacgcgtggacgatcgcgaggcaatcatgaacgaattcaagcagattcaccagcaagccaataaagcggctgctgttgatgtattgcatgctttttatgccaaatggaacaagagctacaatcgtgtcattagaaacctgaaagacatcgagccagacctgcttgttttttataattatcctaagcagatcagggcttcaatttactctaccaacatgatcgaatcctttaataacgtcattaagcgcaaggctaagcctaaagcggagttcccgactgaacagtcgcttgatacttttattggcatccaagcaatgagctacaatgaccgctacttcaaccgaattcacaaaggctttggtcaagtccaggataccttagaatcctattttgaataaataaaacgttaaaaaaacaatttacgagaaagatctatttacacaaaaaatttgacagtttcgatatttagggagagtctcttatatctatcattaaaattattggtttagcgacaaaaagctccaattccgcatgtatcaacgggttggagcttttgcatttttctctacgggaactttttgggaacttttacttgaattttgattttttgctaaagatatcaatttgatgctcaaaattcgttcttgccttaccggttatatggtagtaaatctcttctgtgatttttgagtctgagtgaccaacacgtttcttaatcatctctaggggaatgccttgttcagccagtttcgaaacatgggtatgccgaaagatatgagatgttagtttatctggattgatttcagcatcggcagcaattcgctttaagtaccgattaatagaacctgtttcaatggcattttttgttgtttttttaacaaataaaaatttatggcctaaatcatgtcttttgtaaatttcaactgcttctggtgggagatagacttgtcgattactactttcggatttagcacctggtttctttttaaattctccacgcttgttaccgctcttgtgtctcttcataagagtaccgtttatattagcataatacctaccattattttttacaatgtctttaactcgtaaggagccaccttcgccaacacgtaaacccatatagtataagaattgaatgaaatccacataatcgtttcggccacgttttttgaactcaattaacaacctatggtattcgtcatcggttaaatatttatcttcaatgtttaaatcagtttgaggagtttcgagcttacgcaatctaaagttttgaagtgggttaaagttaaggtaaccatatccaaggccaaagtcgaacatattccatagtgcagctcttcggacatttgtatatgaccagctcttagtttctaacattttgtcaaagtatcgtttgaagtagggagtagtcaagttttcaataataattgaaggatcaacatctttaagaaagatcttaatatgagatttataaatatagtgactttgatatttgctgtctttattgattttatcttgcttatctaggtattcaaaatagtactctttaagctgtttcaaagtaattgagctaatcttaccagttgccatttttctagcaatcttttcttttaagattgcgcgagcttgttgccaagcttgcgatgtctttttagttaaggttacagtaacagctttaagtactattttatccggtgttgaaagcaagggatcaggatatttttgccgatactgatatttactttttccaactttagacatagtaacagcgtattctttttgatattccatttttaattacctctattttttgataaaataggggttgcaaaaggcgcaaggcttttagcaagtcttatatctttttgcaaccaatttttgttagaacactcaaagtaactttggtcggtggctttgagtgtttttttttatttgcacagcttttatagtcgtcagtggttggactaaataaaaagctctttatcagctaagcatgataaagagctaaagggactaaatcccacgtatttgtataaataaggagccgaactcccagtaactcaattatcacacaattttagctctttatcaacagttaagatatatacaactccataattttgtcacttattgctttcatttgatcgctagataattggatattaccagacggatcaaaatcatttatttgccgaatccttaatttactaatagttgttatgtcttcaattcttgcaaatgtatttttattatactttttataaacagtgacaactttttgaagctttttttgatcaatgtaacattgttttgcttctagagatacagctttgctttcgctacatgcagtactaattgattgattcaatttttctatttctgatgtgtgttcggtcatttgcttatataattttgaaaattccaactttttttgttctacattagagtcagtaataggatttgataaaaaattagaaatttgcctgtctacgtttttccacgaattttgaagttcatctcttttttgtgtaagtgttttagctttcttatttaattcattatttctttgaattaatctatttagacgagaatttatttcttgcaatgatgttaacaggaggctagaagtttgattaaaaatttccttgcctaaagaaaatcgaccgtctttaggcttagaagtcaaagggattactgttaaagttctatttttgggactatcacgtttgttcaaaacgacagcaaaatgtaaattactaaattcacttccttcatttacaccaaaattcacactaattactgatccacgtggatagtagaaataattattaattagttctttattggcttcaagtttaaaataatgggagctttcttctagccaatagggcagggatttaaacttttgctggtaatgatatttattgggttctgcaacttgcttaaattttctagcggcagaatcaatatgttcatttttattcaattttgttttcacctctagttatttcttatgatatagcttttgtaaatattctctaatgacttttcgatcatgttctgtcatcggctcaccgctaaaggaggtagcattatctagcatatcctcaatatcttggtcggtaacaagctttttgtttttgtcgtcttttgtcataaatcacctataaatctaacaactgcttcttttttgcgtcaaactcttcttgtgtgattgctccaatgtctagcaagcctttgagtttcttgatttcatctaatggatcagcagcaggggatgattgggtggcagaaacaggttgttcattattttctttcacttttgtcggttcaattgctacagtttcagtttgttttcttttagcattttcaattccagcctctaatacggtagcaagctgatttacctgcttaatacagccagttactaaactatcatcagctttaaatgttgtatcaaaatattcaatttcaaaactagttccgtcatttaagttaacaacaacacctaaatgatctacaaaatcttttgaaatagtttgagtttctttcttactggttaatccacctacggctgcaccaactgggcctaagagaacaccaccaacaactgctctaccaatgccatgttttctcttagtttcagtctttgaatcattgtgttcttttttattaatggagtaggaaagaacatccttaaaatcaattattctgtattttttgctgaatatattttgaatctctaaaatttgattatcctttaaatcgaaatagtagttttcaaatttcttagcatcattatttttgaatttattcaagactttgctatattcagctttttcttgtttcttcttttcagatctttcttccatctttttacttaagttatcaaagaatcccatcttacttcctccaattaattttttctaaaagaatcaaaaatcttgatatctagcttagattgatctttatttttatgtttttcatagtcatcttgtgctttttcaaaagtcggtaatgtatcgttaggataaaaggcaggaattgtaccagaaagagcagcttgataattatccatcattacatctttatatcgcttttcttttctgtataggacgcctagtttctttactgcttttggatataaatagatcagttttaaccactgtttttcagctttatcccattcacccattttataaagcaatattcctaatctatatcttggttgaatgtaatccttaagttcatcagcataatcatattgccagtgcggtgagatactaatactgtatgagttattagctttatctatttgttcttggggagaacaagggtggccggtttcgttattagttattttgccagtactttcatctatagtagctgaaacgctaaagtgtcccggatagtcgcttggttctaactcatccttttctacatatctaccatcacgtctaatagttttaacggtggagtttttacgagctgacttaaagagctttactggatcaatggtagtagaattataaaccttgttgtaaagcttctttctaggatgtaaccatcccatacctttttgaccatagcccggaatcaaggcttttttcagttttcgtttgggtgctgctgataatctggcggataaagatttactgaaagatttctttctaaatagtttcatatctatacttaatatttaatcaaaattcatttcatatttaatcatcttgcctaggatagtcccaggatgatctttgtctaatattatgtctttataatcaggattagctggccttagcactactgttttaccaacatgaagaacttttttaagggttgcctcgccattaatcaagactgcagctacctctccatcttctacatcggcttgttgtctaattatggcaattgctccattaggtataagagggtacatgctatcaccttgacatctaagagcaaaaagagtgtcatctgcatatctatccatcatatattctggtatatatttttctatattttgttctgcagtaattggcgctcccatcgctatagttcctaataaaggaaccattcttgacttattttgattaataggttcaagtcctaataaatcttcggttttaatatgtagtgcttttgcaaaagctggtgctctatttataggaaattctcttgtgtgattgaagtatctggacacacctgatttggccattccaacgcgtctagctaattcactaattgatacgtcttgctcttctcttagttgatttaaataatcaattatttcttcactactgcgcattatttcacctcatctcttaataccaataatactccatttgttgacaaaaaaatacattttttatctttttttatgttttttgttgacaaaagaatacgatgagaatattatatagttgttcttcaaagtgaacgaattgaggtggaataatgaagtttgatttgcaacgtttaaaaggtgagcgtgtagcacgaggaattacacaagctcaaatggcacgtaaaataggcattagtacgaatgcctattggagaaaggagaatggagaacgtgacattggtatggaagaatttgtcaagatcttaagtgtactaggtttcgaaaagaaacaaatttcgcttttttttgcaaaagaagttcacaatagtgaacattaaggagatgaacaaatgaacgaactaattaatataaaagtccaaaacgatcagcaacttgtttcagctagagatttgcataaaactttaggagctaaaaagaagtattctgaatggatttctcaaaatgtagcaggttttatagcgggtatagattttacgaggtcacctgaaagttacctcgttaaaagtggcaatggaacagtgcgaaaatacgatgatgttcttttaacaattgaaacagcgaaacaaatttgcatgatgtcgaaaacatcaagaggtaaagaagttcgcaagtatttcattcaagttgaaaagaactggaataacccagacatgattatgcagcgtgcattaaacattgcaagcagtcgtgtcaagctacttgaaaataagaataaggaacttgaagacgttaatgccaaacaagctgaaaagattgctaaagatgctgacgatgtagtttttgctaaagctattagatacagccaccatgcaattactattgctgaattagctgacatcttaacacaaaatggctttgtaatcggccgtaaccaactatttcaattgttaagacacgctaaatatttatcacaccaaagaagtacctggaatttaccaatgactgacaaggtcaaaagaggatattttcgaataacccacaggcttacaagagatgatcgcccatattcacaagtatttgtaacaccaaaagggcagaaacatatcatcaataaggctttacgtgggaagttcgatgatatttatcaagaagtgatggtaaccacattcgacgtttagtaaggagagaacatgaaacaagtggaacatagtagtttaagaaaaatgaaattaaaaactgatgaagataatcagcctatgaagaactggtcaagagtaatcatcgaaactgatgaagccaatccccaagtattagcaattattactaacgaaaactatgggttagcaaaaggattaagaattcgacttaagcctattcctaaagaattagtttttaaacgtttaccttgattgattgagaggagataaaaataatggacgattttgcaacagtattcgcgattatttcattagtcgttgcaattatagttgctttatatactaactcaaacaaataaaaagacctaattgagctgccactcaattaggtcgcaaaatttttaaaagtctcaaaatgttggcagccattctccaattttttactggtattgtcgcccagcactgcaattagaataagttactaaaatcttataaccctagctaaagcttaaatcatttaaagcaatacaaaagcctcaataggtagaagaaagcttatacctcgcatttaacgtcttgggagacgaaaaaagtgactccgccagtgagaaagtcggtgattcgttagcttacatagacacagtgttaatcaaaaattcgcccaaaaggcatcaactccaatcattaacaatcagaatttatttgattaaacattttacattaataaattatagcacaatatgtgggctattacccacaaaattaaggagataaacacagtatgtggtggcgacatatagatgaattacttcgtaataagaaaatttcattaaaagaattagctataaaatctaacgttaattatgaaactattagaagttataaatatagaggatacgaaccaagttttaagaacatgtgtaagattgctgatgctttaggtgtcagcctagatgaattaagaggagataagaaatgcaaccactagatattagttacttatatttaagtgatattggaaaaagtaaacatgaaatcatcactagactgcagcaactgtctttaattgatggcaattatcaagcaaccggcaaaggtgtggatacaggctggctaggtattaagacgaccagtgtttggaatccatctactgaaagtatgataaacgaccaagcaacagtattaaccgaattgggcattatctacatcccagttctttttgaagataagttctacaaagacatgtcagcaagtcagaacctagtagaaagagcatgcgatggtgaattattgtcaattaaagagttaagaaagcaggggtatttgaagtgagcaaggaaacatggctaactgttaaagaattatgcaaaaaatacaattattcaaagtatgcctacaataggcgccaaaagaagtgcctattgtcttcatataaagacgcaattgtgtatgacggccagcataccatgattattgaagaacggtggcaagcgttcctaaaagatcaatcgaaaaagcattgggaagaagtatttggtacaggagttatgagagatagaaaggcgttagaaagatgagttttactaaatggatcaatcaaagtattaataagtttatgggtacacaatttaccgagcgtgaaacagaaattataaccataggtgctacattcactgtgattgcagtagttttcttacttatgtataacgttgtgtttcctaatatttaggaggtgaaactatgacagagctatataagcgcttggtgcttgcttcaaatgcaataaattatcttgccaccgaccaaagaccagatgagtaccaagcagcatttgaaagagcaaaagaaaagactcactgcgtaaccagtgagtctacaaaacaactaactttattctaacaaaaattggagcaaaaagatgacaaaagatttaattagatttgaaaatgaagattttcctattagttttaaacctgcagaagtggatttccctaacgctgcagcattggaaaataaggtagatgacttagtaaaaggctgggatacctatgttgtaacacctgagtcttatccctatgacaagaaaactaaggctgaactaaaccacattcgcaaagccttaaatgataggcgtaaagagattactaaagaagccaatcaaccaattgatgactttacagcattaattaagagactagatcttaagattaaaaatgccgtggatcacatcaatgagggcattaaagtctttgatgaaaaggctaggaaagataagcgccagcagaacttaattagacttggtgagattgctacagagtacggtgtggctcttcaaaaattggagtacaaccctaaatgggataacaagtcaactagctggaagaccattgaagaagaagcaagacagcaatttgaagcgattgttgaacaggagaaagctggaaaagaagctagacaagtagtcattaataaagtcagtgactataaattgattatgaccacagatccttatttagaaatgcttgactataaatcactccctgaggtccttactcaaatagacaatgaccataaacatctagttgagcaagctaagcaacaagaagaagatcgtaagaaagctgttcaagccttagaactacatggcgataaatatattaatactgagacgggagaagtggtaagtaatttaacaagtgttggtcttaaatttactgataaaagtcaaaagattactgaattacttagatatattgaagccaaacatgttaattgtgaggcactaggaaatgaacaaataagtgttgaatttaagttcattgataacactaggaaaattgcaggattatctgaatatattaaacaaaagcaaattaactatgaagtaattgaagaagaaaggacaagtaagtaatggagttacttaatgaacctaaaaatccaattgcttctcctcagtcaattggattaatgaatattcaaacaattgtagggatggatgctaagcaatccttagatgcaaagctatcacttcttaacagtttcgttcaagtcaagcaagcgcttgaacaaccttcaaaaagtaaagatggatatggatataaatatgctgacttgaatgcagtcttaactgcaattcaaaaagccattggagagctagatttagcatacattcagcaaccagttaatgagactgcgaagactggtgtagaaaattatatttttaatagcaagggagcagttatcgactttggtagttatttattagatataaccaagccacaagctcaacaatatggatcagcattaacctattgtagaaggtactcaattagcagcatttttggaatagcctctgaagaggacacggatgctaaagaattgccgcaatacatgagtccaacagagatagaaaaattaactctttcttacaaaggaaagcaagttgccttatctaagctattctctctaggactagcaggtgatctagcagcaaaaggcaaactactagatcgagacaataacaacgtaactaaactagccgttaagagcatgacagatatgtgggatttcgctagcgagatatcagctatgaagagtgaagccaatgagaaggttaaagctaaaaaagataaggagaaaaaggaaaaacaagctgcagtcaataaagttcagcaatctcaaaaagatcctttcgatgacaagaaagtagaagctgctgttccaaaagaaggaaagttattttaggtagaattatggaatttacaggatcgaaagcttttctaaatattccagttgcagctgccagagataagaagttattaaaatatccaaagtctatcattcttttgggtgaaattgtttcaatgctaaatgttacaggcgaattctttatgagtaatagcacgctggctagacgtttgaattgtgaaccaagaaccattattaactatgtaaatcttttagaagaagaaggatatatcagtaaaaaaatagtcagagatacagagaatggagcaattaaaggaagaataatttctgctggtgataccctagtgaaatctgcttcactagggtggtgtcctacatttcaccagggtagtgaacaggaattcacgggggtagtgaaccagcgttcacctaaaaagaacaagttaaaagaacatcataatagatcacttaataagtctctctctaaagaagagagggagagagatgcaaatgcaattgaaattctaatcacttatcttaaccattgtgctgaggagtggagaaggccactgattacattttctgatacagaaataaaaaagatggtcaaagcagtgcatggtaaggacactagagctttaaaagaagttgcagagaaaacagttgtctatggtgagcagtatccacaggggtacttattgacgtgcattaagaatttaccggaggaggtagaaaatgcaaaatcgaattaaggaattacgagaaaaaagaggaattagtcaagcagatatagcaagaggagtacatctaactagatcagcagttggatactacgaaactggtaagcggggagcatctaataatcaaacttggcaaaagctggcagattatttcaacgtatcagtgccttacttacagggctatgttgacgagtatattgacattcacgatttaaacgaagaggagcaagacgcatataaccgtatcactgatatgctatgcgaagaatccccagaagacagcatctcttggtcaaagattggtcaattgttaattaattcagcggaggaataagcgaatatgcttactgaagaacagatcaaatataaaaagcttgaaaatttaaaatgcgagctttttaacgataattttgagaactttaaaagatatggcattcctaaagcgcaattaatcattgctgatattccctacaacattggcaataatgcctatgcttctaatccaatgtggtataaggacggagaaatagctaatggcgaaagcaagttagcaaacagtaattttttcaacagggatgaaggctttaacgttattaactttatgaagtttgctagaaaaatgctgattaaagagccaaaagaaacaggaaaagcgccagcgatgattgtgttttgttcatggcaacaaatgccaatgctagaaacgcaagctaagaaagaaggctttaaacactgctacccattgttctttatcaagccaaccagttcgcaggtgttgaaggcaaatatgagaattgttggagctacagagtttgcagcagtcttttatcgagataagcttccaaagttcaataacgatggtcagatggtacttgatcacatgaattggaaagtagactttagttatcctaaaatccacccgactcaaaagcctattccagttttaaaacgcctaattaacttatttactgattcgggcgatgtagtgattgatccgacagcaggaagtggttcaacactaagagcagctgctgagttgaaaagaaacgcatatggttttgaagttgaaagagagatgtgcgaaaaggcgaagaaaaacatgttacaacgcacagaattaagtttgctttaggagataaagatgaaaattatatataagcaagaagaacaatggcaattaggagacgtggttaagagtataagtggtgatataggagtgataattcaagatgccatatgtaactatcgcatgataaatattacaactaattacttatttgtcgataagtatgacaagcctcaagatttacagaaggattttcaaactcggtggcacaaagtaaacgcaaagctggtgattgaatgatgctttgcagtgcagttgcctttgtagaaggctatgatcctaagattaaactcagccagaagcaattgcttaatatggtgcatcaaattaagcctaatgaacctttgccaaaagaaatagatggctataaggttaaaccttgcgatgattattctaaaagatatttaatttatattttttacagattggagaactaaacatgaaattgaataaacaacagaaattaatgttgaagaaactagattcttgcttagaaataacgtcaacaccgttcttagatgacagcgaacattttagctttttcgttaatcacattttagctaagttagcaaaagtatcgtttaccgaattaaccactctaactgatgacgttgacgaaattgtgaaggaggatatggaatgactaaaaaacagcaacaatgcccatattgtcacacagatatttgctatacaggatcggcaggagagcgagaggaaaaagtgccccagaagtatctatataactacgaatcacaagatagtttatttaacgcagcaatatatgtattgagtagagaactctgtatagatgttgacgatgaaagtggagcacttgcagataaaattaagattaagtattgcccaatgtgtggacggaggttagttgatgactagaagccaagcaaaatgtccttattgcgattttcaaggcgaagatcaaattggaatggaaataaacagtgaaaagcgtttgtcagaggaccagatgatgtcggttgattgggaagatggctactggtttaactatttgagaaggagaaaccgagatcaagtaactcttgtaagtcttcatactgacaacgaattctatagctttgacattgatgaggtagaaattgaatactgtcctaaatgcgggaggaaactatgaaaattaaaatacttgttgagtgcgatcctcaaagcttagaaaaattggttaatgagtttatagcagacaaacaggtgatagacatcaagttcaaaattaatgattatcctgattattttgcattagttatgtatgaggataagtagcatgtcagattggatttttgcagcagcattcttaattctgctagctatagtgattttggtggtaggagcaatgtaaatatgatttttagattagaagaggaattaccttttgatatgccagaaaaattaaatgaatactggttgaatatcttaaaaagacgtgattttaaagtgattgaaattaataagaactcacgtgagcttgagtaccgaatagaacttatgagccttgatgatttacgtaaatttcaaaaagatattggattaagtttaataatttcgtttgaagatgatgaggacacgagcgaagttgatgggcttattaaaattttcggagcctaagtgatatatgagagttaactttacaattgaaggagtgccgattggtaaggcaagaccgagagttactagaacggtaacttacacaccagccaagacgtcacgatatgaggatttagttaggtatacagcgattaacagcttcaaaggcatctttgataaagatgagccgttagacgttaagatcatggcatattttgaagtcccaaagagtttaagcaagaagcgtaaggctttatgtttggctaaccaaggacttcctactaagaaacctgatgcagataatgtgggtaagatcatcatggacggcatgaacccaaagatgagacgaaataagcaacttcataaaatggttgaggttatgagaggtgtctatcacgacgacaagcaagtaacctctcttttagttaagaaaagatattcagagtatccacgagtagaagtaacggtagaaagagatagaggtttgtaaatgaagaagattaaaatttatgataaagaaaaattcgattgggcattagacagcgcatttgatgctttaagtggaaaggttagtctagatgttcctgaaaaactgattgtaaaggatgatgacaatgtctaacgattaccggcgctatcacttagcgcatgatgaaccatataaggatttaaaacttatacataagtttgatactgcatcccttacagttaaagacttgtggaagttgaaagaagcagcatatcgtgaaggatatttacatggtgtggaagcaaagcattatagagattacggcttagaaggctagtttggagttggaaacgtggaacacaaaaacattgatttaggactaagtatgaacatggaaaagactgccggacgggctataggctttcttaagtacacgtttccagagtatgtaagaggtgcagctcttagcttagatgatttagccggccaaccatttacagggatgccagctagtcatagtgctaccaattcacaagagaaaaagctagaccatgcttggaagaaagtagaaaagaacgagcttaaagcagcaaccgtttatcaaactatattgctatgccaaaagagtcctacatatccatatcagcaaatacttctcaataaatttgttaaaaagcttcctgattggaagatacagccaatggtagggtattctaacagccagtattatttaaagcgcagagacgccttatgtgagtttgctgagttgcttaattctaagaaggtaaaaaatgggtgtttcgatatacctgatttagtcattgagattgaaccagaaccggaaaaaagtaaatcggacgatcatcggacagtttccggacactaatcggattgaaaccatggtaaattattattgtcgaaaaaataaaaagtttcgacaaagacaccctttcaaacaaggaagatcctagaaatcctccaagaatttttagtattacaattttagatcttgaatagatctcttagtacatcaaccattatttgtttatctctgtcaaatagtctcatgattggtgtgcagcagcatttaggttcgattcctacttgttgcttacctaggccacgctacgacctaggattaaatatgcgatgaccccacggttcgggcgagcgtattgtagttaagagttggctaatcgttcagtggactgcgcgatagccgtgggcagtacgacacaattggaatcttagaaagaaagcaggaattttctttcacaatatgaagtgggttcgattcccacactgctcattgtccggcggaaaacggacgttaaaattaaatctttaccttgtcatactattggtaaagtaagtcgttataaatgataattttattcacaaaaataagttagtcattgattttacagcagagggcttagttctgtgcctttaaacagagcattctggtagcttagctcagttggtagagcatcggtgtgaagtaccaagttagcggtggttcgatcccatcagttaccatatgacagagatatatcggaggattaagcatgaaggcattatcaattcatggtaattacatcatggatattattaatggatctaagactatagagtatagaacatggactactaactacagaggcccattgttactatgtgcgtcagcaaggaagtatcctaattcaatctatggtcatgctatttgcgtagcaatgattaaggatattgaatggaatgaagaggatcaactttattactggcatatagagccatttaaaaagggcggtagctatttaattgaaccaatcaaggtaaaaggccagctaaaactatataacgttgatgacaagctaattaagccagctccatttgttaaagtagatcacaatgatcctgaatttgaagattggtataatcgcacgattaaaccgttactttatattccaaaacgaaaagtaaaaagagatgttgaaccacagttcagcaagtttaaaaagtttcatatcgtacattaagcgctactagagcgctttttattttgcaaaggatatcttatgagtttactagatgcaattaagacacaggcacagataaccgataaagtgcttgtgtctttttctatgggcaaagatagcatagtaacacttgatctgtgcaagaagtactttaagacagtacaaccatttttcatgtatttagttcctggtcttaagtttcaagaagaagcgttagcaaaatatgagcgtcactacgatgtagatattatccgagtaccacactttgagaatgctgacttttatagatatggttctttcagggatgctgattactcagtgcctagagttaagatcagagctatttatgaagctattagacaagaaacaggcattcaatggatagccggtggagaaaagataaacgattctgtggtacgtagagcaatgttaaagcattcaggctctattgacgttgaacgtggccgattctacccagttatgtactggcgagatgcggaaattaagagatatatgcaagttaataatctgctatatccagagtttaaccgcaagttaggttttagtttccattcgttagccggcaaagagctatcagcaattaagcatatttacccagatgattatcagaggatacttaagttttttccagaagcacaggccggcgtgctgcaatatgaagcttataagagaggtgagaaatagtggttagcttcaaatatggagcaagatgagatatggagtcgacaaggaaaagttataaacaaaatggcagaacgaattatgaagaaaaatcccggaatgccaaaaataagggcacgaaagttagctagagaaagcaaaaaaggccgtagaattacaactgttggagtaacttcaagtgaatattcttatttgaagagggcttctacaggtagtatgagtggctaaacgaattattttgctttgactggaaaggagaaaattgatggccggaagaagaaaaagcaagtcacttgttgggactattaaagcgtcaaaggatgagaatgaattctcaggatcagcatacgacagagttaatagaatgatgcgaggtaaaagcagcggcaaagtgatggctcacaccggtcatggtcattatttatactttttcagcaactgacccacatccaaacaattttacttcaatgggtacaaaaagcgtctacacaataactaaacagaaaagtggctggaaacttggccggcttagtggagatttgagagataatattctttctgaaccaacaatgcaggtaggcggtagcaagaattacaagagtggcagccttaagtttaaaaaactgtcagatttaaagaatagcaagatgaatatcagtgctaaagcaatgaacaagatcaagctagctatgagagattataaaagcagaaatggtagaggtggaagaagttcttctggtcactctggaggctaaaaatggtgcgtaaaaaagtaatgtccgagcaagaataccttaatcgtaaaggcgttggaagttcattaagtggagttatggatgaccgtttgcgttctgttagacagcttagatctactagaggcgaggataaattccatcgtgagaacaaaaaggctatagacagctaccaagctaaacgaaaccaatctaaacgtgagtatcaaagattagtatctagtggaaaggtacgaccaccaagcaatgctgaaaaggcatggaagactgcacacggcttatctgaaaacagagctgtacaagcagcaagacgcgtgttagctaagcatggcgtagattggaaaactggtaaaagaataggaacagcttctggtagaggattatggcctacttttcataaaggttctacaggcagtcgaggaggttaattatgtctaaaccattgcagcaatttgaatatggaacagttaagcgcagtcagatcaagtttgctgattataatccacgtattattgatgaaagtaaccaaaagaagctcgttaaagcaattcgagagaatggattaatagagccactagtttggaataagcgtacaggcgtccttgtaggcggtcatcaacggctaacagcagcagataagatttatcataagaaagattatgatgttccagtagcaatcattgatgttgatgaaaagacagaaaagaaattaaatgtacagcttaataatccaagtatgcaaggtgactgggatttggacgagctatttaatctttcgcaagatgtctcttttgaggatatgggctttaacaagtctgatatcgactttatgtttgacggggatgttgattttgatgggagtttatccaatagtgatgaaccatcaaagacatcaacgccttacgatgaagaagttgaagatgaaaaggataagatggctaatcttgctgaatttaataaaactaagagcgagttcagaaagaaagataatgactcaaccgttattaacttctataccaaggttatctttccaagtaatgaagctaaggaagaattctataaaaaggctaatattccagctaatgaggaatacattacgtttgaacagttaaagaggtattttcaataacgctggaattaaattgaaaaactttgtgaagaaaatcagtttggccaagatgagcgaagttcattcaaacccgacaatatagcattcttagtttgtgaaatatggaggtgattcaatggctaaacagttagatttatttagtgcaagtcgtaccacgtcttataggaatcaaaatagagttgttcaaagaagattacggactactggaagtggtgaccgtagaattacaagaatggctaatcgtgttactggtggtcaaagtatgagagctaatggtaatagattagccaaagcattaactagcgcaaagcgaagtgttagatcagtaaagatagctttaagaagaagtggcgttaaggttaaaagaagttcgtttggtagtaaaggtggttaaagtgatgaggtggattagatggcacatgccgaatacaagaaatggctagagcctgataatcttaccaagcttagatcatgggctagagatggcttaactaacgaacagatagcaaagaagattggtgttaaacgtcaaacctttcaaagatggttaagtatatatagtgacatgagtgacgccctgaaaaaaggtaaagaaatagttgatgctgaaattgaagactctttcatttcagtcatgaaaaaacacactcttaccactacacagtataagatggtcaaaaaagatgagtttaatcttaaagctgaacgtactaagtttgccaacatttataaactagatcatccacaagctacacgggaagagatagcaattgcaacagcagagaatgttgatgtttatgaaaagatacctataagcaagacagtaacagaagtggatccaaacgcttctgctattattttttggcttaaaaatcggcgtccggacatttaccgtgaccaaacattccagaaacttaatgaagctaatgctcgtaagacacttgcagaggcacaacttagtgaagcacagcttaaggcgcttgaagaaaatgatgatccaagcaataagacaatcattgtagatgatataagggagattgatagcaatggcaatagtgaaactaagccaagagattaatcctcacttttataccgcatggaatagtaataagccttatcaagtttataagggtggccgtggttcttttaagtcgtcagtaatcagttttaaacttgttactacaatgatgaagtacattgcgcaaggcaaaacagtaaacatcatttgtgtacgtgaaaaccaacgctatttacgtgacagtgtttataaccagatcttatgggctatgaataaactgcacgttgagagtgagttcagaactcgtgtatcgcctttaacaattactcatataagaacgggatcaacattctacttctatggtgctaatgatccgatgaaacttaaatctaacattgtgggtaatgtaatagcagtttggtttgaagagtttgctaacttgaagagtgttgatgtattcgatcagtctgtacctacctttatcagacagaaacctgatttcgcagaacaggtaaaggtttatatctcatacaatccaccgcgcaatccttacgcatgggtgaatgaatggattacacagcgtcaaactgatcctgattacttcatagacacaagcacctacttagatgacaagctaggctttaccactaagcaacaattagacctgattgagacatataagcgtaatgatccggactattaccgctggttataccttggtgaagccgttggacttggtaccaatgtctacaatatggatctatttaaagttgtggataagataccagatgatgaatatatcactgagatcttttacggcatggatactggatttatggtatctgctactgcttgtgtagcgtgtgctttaactaacaaatacaacgtttatgtattagataccttttactatgatccaactaagtacgctcgtaagctatcggcatctgaacaggctgagcgggtacatgactttatcaatgagataaccaataaatacggtgttctaccttataatcaaacaatcgactctgctgatggtggtatctatacacaatattggcaaatgtacaacacacagtggtctaaggtgcataagttgagtgaggcagcaatgattgaccgcgttgaggatcttttagcacaggggcgtctatatgttttgaaaacaccaggcaatgatatctttttgcaagaacaccaaaaatatcaatgggatccagctacagttaatagcgataatccacgcgttattaaggaagacgaccactcttgcgatgctattaagtacgctattgtggataatgagcaactactcggactagcagcataaggtggtgagtatatgggactatgggccagcattaagagtttattcaggaaaggaggtgctaagttagggatgattaaatcattgggagctattacagatgatccaagaattgcagtgccgccagaagaatatacacgtatccgaagagctaaagactattattctgataagcctgtagatgtagattactgggtattaggcaataagaaaaagcgtaagatgaacaccgtcaatatgacgcaaaaggcttctaaacgcctagcgtcaattatcttcaatgagcagtgttccattaaggtgaatgataatgatttacaaaaacaacttgatgaaatctttcgtgaaagtagattctacacaacttttgaaactaatctacagcgtgctatagctttgggatcaagtgcaattagaccgtatgttgaagatgataagatcaagttgaactggtctgacgcgttaggtgtatacccattgaatgctaatactacagaagttaaagagattgcattagctcgtaagattgttaagaccgttaacgatgagccacactattacacactgctagagttccatcaatggggcaataaacaagcagatgaggacggccacgaatacacaccttacacaattactaatgagctatatgagtcgactgacgaaagtgaaacaggcactcaagtacctttaacttcgattgaagagtatgctgacttgccacagcaagctacttttacgcatataactaagccactgtttgccttttatcgaaatcctggtgacaacaataagagttttaccagcccactaggtttaggactatgtgataattgccggagtatcttagatgatatcaacgtgacacaggacggcttttattgggatgttaagaccggccgaagacgtgtaaccatccctcaaagttgggtaagacgtcaaactcagattaacggcaatcctatcccagaaagtcaacaaatgtactgggacactgacgatgatgtatttgtgccagttaatgcgagaatggatgacagcagtgcctttaaggatctgactattaacattcgtacagatcaatatcaagcagcaatgagctacttcttacatgagtttgagaatgaaattgggctaagcgaaggtacattcacagcgacgcctactggtattcaaacagctaccggtgttgtttcaagcaattcaatgacttatcaaactagatcaagttacttaacgcaagtagaagatactatagaccagttagtttatgcaattgctgaactgctacagacaccagaactatggagcgatcaacagcctaaatggaccggtgacttagatagcttagtaatcacgcctgacttcaatgacggcatatttgtagatcaagatgcacagttcaagaatgatttatcagctcttaatgctggtgcaatgcctattacagaatttaccaagcgtaactataacttaagcgatgatgaagctgctaagtgggtggaacaactgcaaagggaaaaagcgacaccagcgcctgattttgaacagtttaatcccttagcagatatgcaaaagcaaaaagataaaggtgaggtagatggatccacaactaagcaagatgatgaagaaagcaagcaagatagttgattactatgattacttgcagcagcataccttttatttgctgattgacacgtttaaaaagcacaaagggatgcttattaatgctgatgaaaaaagcgtcttagaatggcgtttaaaggctcttgctgagatgggtggtttaactgacaaagtgattgatttcattgccaaaaatattggatacagtaagcaagctatttatgatctaatccaagatcaaggcttaaaagtagcaaaaagaatgaacactgaactatctaccgctttaaagcaaccaatgaaggacgttagcaaagatacagtagcaattattaacgcttatgctgatcaaactttcagaaacgttaacaattacgttaatcaaaccttattaacaactaatgttcataaaaataccgccttaaaaacctatcaaaacattatcgacaaaactgtattagatgtttctacaggaactaagacggcagatagagcattaaaagacaatatcctccaatggtatgacaaaggcttgcctacatctctaacagataaaggcggtcatgagtggacgctagaagggtatacaagaactgtcattacatctactactcaccgagtatttaacgaagctagggcgcaatctatgaaggaatttgacacagtgcttgctactatgtctagtcatccggcagcaagaccggcttgtgctccaattcaaggcaaagtagtgtgcattgtccctaaaagcgatccaaaagttgacctttcgtatcctaatatctatgactatggatatggtaagccagcaggaacacagggtagacgttaatgccctgtataaacattgtgaacccttagcttaggggtgttttaacggtattaattgtctacataaatgatataatagttatatagattaatattgttaaagctaacggggaaagcctaatttaggttaatcccgtgccaagtttaagaggttctcagcgatgaataaaactattggaatttatataattattaataaggcaactggtaaagtatatattggtcagtcaactgatattcatcaaagatttatagatcactttaaaaaagtgcaataaatcaaagaccttataatttacataaagatattgctaaatatgggattcaaaattttagtaaaaaaatcttagaagaatgcaaaatctcagatcttgattttttagagaaaaaatggatattactttacagaaaaagaaatattccaatgtataacgtaatagacggcgctcctactaacgctgaaaatatggcaaaagccaaaagcgttcaattttctcaaatgaataaaagaaactggcaaaacaaagaatatagagaaagacattctaagctatctagtcaaattcaaaaagaaaggctaaaagatccaaaatatttagcaaagaaaagccagcaattaaaaaaatacactgattctcttaaaaagagagttggtcaatatactaaagatggcaaactaattaacacttttgatggtgtgcgagaagctgaaagagcaactggcataaattcaagacaaattagtgcagtttgcttacacaaaaagtatagaaaaagtgctgacggttatcgctgggaatttattaaaaaggtgtagagactatcgaaagagtaaaaatcgagtagagtagaccggaagacaagctaccggtcgaagtgcaatgcgaggcgaaagccttagatgatatagtccgacacttgtagtaatacaagattacagaaaagattaactgtagccacattctttatccttacatcaaaggcgtatctcataactttcaaaagcattatgatcctaagcaagctgtcaaaaacgcaaagatacagcaacagcaaagatattatgaacgtagtattagacgccttaaatacaaaaaagaacttgctgagagggatgaagaccctgaaaacgttagaaagctaaatcaatcaataaggggttatcaagctaaattaagaaagattgtaaaagataatgacttcttagcacgtcaatatgatcgtgaacagatagtaaaggaagattaattaatgaagttagaaaatatattaaaaggcaacgtagaaaagcctgttttaaaaggtctatttgaaaaatatgatagtgaagctttaaatgaagaaattaaaagaactcagaaagaaaacaagccaatgaaagatatttcaagagtgattgttgaaactaatgaagatcatcccaaagtattggctgttattactaacgatagttttgagatggcaagtggtcttcaaattagagaaaaacctgtttatccagataaataatgaataaatcgacctgagtatgtcgctaaactgcttttttattatgctctgagcgaggtcgtccctcgtataaattaaacgttaggagaactaaatatggaacgtgattttttagaaaaacaaggcttaaatgctgagcaggtcaaggccgtcatggcacaagctggtaaggaaacaaatgccttacgtgatgactatgaccgtaaactagctagcttaaacgatcaagtagacggctataagtcacagatctcagaccgagataagcaaattaagaccttgggtagtcaagcaaaggataatgaagagcttaaagctaaagtagctgaatttgaaaaggctaataaagaaaaggaaaaagaatggtcttctaagttagctagtcaaaagaaagagtttgctatttcaacggctctcagtaaagctggagcgcttgaaaacaaggctgtcttaccttttattgacactaataaggtatcacttgacgagaatggcaatttaattggctttcaagaacaagttgatgctgctaaacaagattacggctttttattcaaacaggacaagccaaaagaagaaccaaagccggctactcacgtagttgtttcaggaaatggcacgtccgaagtaccaaaagatccagctaacatgagtcttgaccaacaaacagaaatgtttaagaaagatccacaaggctgggcaaatttatttagaaagaagtagtaaaacatggcagaaacacatttatcagatatgattattcctactgtctttggtaactgggtacaaaacttatctaccaagactaacaacttagttaattccggtatcttgactccggattcagatttaggagataagctaacacaaccagggacaaagattactattccatatatcaatgacttagatggaacagccgataactggaccgatgagcaagatattaaagtatcaaacctaacatctggctctcaaattgggatgaagttctaccaaactaaagcctatggtgaaactgaaatctctagattgctttcaggtgcacctattcaagaacaaattgctagtcgttttgccaacttttggaatactagtgatgagcaaatgcttttagcagtgttagaaggtgcattccaagttgacgatgtggctaatactaaaatccttgatttaacgtctaagtcacctacaaatgcggaatttagtgcaaaaggatttattgcagcacttggattaatgggagaccaaccagaaaatatgctaactggtatttctgttaactccgcaacttatgcaatgatgaaagcacaaaacttaattgatactattcaaccttcaaatggtggaactccaattaacacttataacggaaaacaagtagtaattgacgactctattcctgtagaaaaatctggtagcaattcaacatctgtagcctatttatttggtacgggagccgtacgttattcaactttattaaacagtactcaagttgtagatgaaccacttaagcaaggtggacgtgagagtgtagttcaaaaacgtgttggttgtattcatccggctggcatttcaattagtcctacgtttgtgcctaacaaacctaactttccaaccccagacgacttcaagaagaaagaagcctggagtttgccaaaagatatggacgtaagaaacgtacgtttagttgaatacaagtttcaaattgatccgttgtttgtacctgctgatacttcaaagcaacaaaatgcagcatcagcaccaagtagaaatagctaataagtaacaagggggcttctaaatggcattgcttaataaggatgagtttcagaagctaactggtattgttccagatgctgattttgataagttagaaaaagcggctgaaagtatgattaatcctttaacagggatgtactatgaactacattctattgacgaagatactgacattaaccgagttaattggttcaaaaaagctttagctttacaaattcagtatatgagtgacattggagcctctagtacctatgagatggcgcagaaagacatcaagagcgtatctattgatggtacaagtgtttcaactggtactagcccaactgattcagcaactaacggcgtttataacctagccttagaatatttgttttacacaggattactgtatagaggtatctcatcatgctaaagccgccaaaatcaatgtgtaaccaatcaatcataatcaaacgtaaagttgaagatgatctatacaatgaagctacatatgacgatggcgttgagataaagaattgtgtggtacatcttagaacaatctactcaggaactaacaacgatcgtcagattgtagctaacggtacagtaatgctctatcaaggtatatcagagccgtttatctcgctatctaagcaagatattgagaataaagcaaagattatctatgaaggacaagaatacacgttaaccaatgttaatgaagactatgagccgtttagtaataagctttatcaatacaagctaacgatgatttgaggtgacagcatgggaattagagttaggacgaatcttaatatcatgaaccacaaattcagtgaagctcagttaagacgtgggcgtttagctatggctaatgatgcacagcaagcaatggagaagtacgtacctaaaaagagtggagacttacgcgaccatgccaaagtagcaactgatggttctagcgtttactatgttgcaccttatgcaagggcacagttttatggatttataactaatcaatatggtggtccatttagaattcataattacaccacagcaggaacatcaagacggtgggacctaaggcttaagggcaacctttcagagatggcaattcttaaaaatgaatttttaaagggcgcaatgtggcatgagtgatattaagtttgatctacaggaagctctagcacaatcaattatcaaaggcactgaattgccgatcaagattgcatacttagcaccagataactctattggcttagtgccagaacaaggctctcacaagctttcaactgattttagtggtagagaatactgggtatacaattacgcaattacagagcgtggtaagagcgctagagagattaaggatgatctttttaagatcagtttatttttagatgatttacagccaggagcggttaagagcgacaatagcaattttgtttttgacaagattgatgtatctagcgctcctagtgaaacagaacaggatatgcaaggaacagtgacgtatttattagacgttgctgtttttgtttacacaaaataaggagattagagaatggctactaatttagttcaaattaaagggactgaaatccctacagatggtgcagcgttaaacgttgctaaccgcctatatatcgacattacagacaatgataatgatctatctgatatcactactggtaaatgggcttggttagcccgtggtattagtgaaattactccatcttggcaagaaaaaacgcaaaagatggcttactacgatggagatggtcacgatgacaccgaagtaactggtaaatctatgcaattggctgttaaaggtgttcgctacttaggcgatccagcacaagattacattgacggtaagcaatatgctattggatcagctgctaaaacccgtgtattgtggatcaacaatggcatgcctgtagtttcagcatgtgctttaaccgcagtaactccaaccggtggtgcagctgatgcacaacaaaacttctcacttactattgcctttaacggtgcacctaagacaaccacaggtaagttaactttaaataaatcagatcaagcacacgtgtttactgcctctgtaagcgataatacaccagcagtttctccaacaggaacgcacgctaatactgatacacaaaaataacattaggaggttagtcaatgtcaattattgatttagataagcgaattaaagtagataacaaggtagatgttaagctggctggcaagacttataagatcttgtttgatgataatttccaaaagactgtagctaagtcttctgttgaagtcatgaacggtcttaaagctttagatgatccaagctgggaagataaagacatggctcttcaaaagaaagacgtagagaatacttttaactctgttaagaattcagctatttcagcattggataagctattaggcagcggagaaggtaaacgtctttacaaatattacaattactcaactgatgccttaggtgctgttttgaatgctttaaatgatgaagcgaacaagtcgattgaagtaaaggaaaagaaacgcaagaaacttaagcacttagctactcctacctcagtaaagggctagaactatgttaagtctaactgatacgcctttatcagctatcaagtttgacggagaaacatatcaaattaatttagcttttgacaatgtaatcaagtatttagagttagtagaagatgatagtgaaaacaaggaactagaagcccttaaattattctttggagaccaagaaatacctttagatcccgattttatagaaagtagcttcaagttaattaatgaaactattactaaatcagcatatcaaggtgactcttcaaaggattggagcatgaatatagcaccacagcatatttactcatatgagcaagacgcggacgctatttactcgtcctttatgatgcaatatcacatagatctacttaaagagcgcggaaaaatgcactggtgtgtattccgtgctctttttgatggcctgagtgaagatacaccaatccaaagaataattgaactaagacagaagaatttaaccgatgtaccagatgaacagcgaggcaaagtaatgcaacttcaacagtattacgctttgaagttaaagaaacctaagaccgaggaagatgtctttaacaatagttctttatcatctgcctttgcttccttaatgaacacagcgaaaggaggttaataaatggctgatggaaagataactattgatatagacatccccgttgataaggttaaaaccgatgcacagttaatagatcagatcttaaattcacttggtagggatgcaggtaaagagctagatagtagctttgaagagtcgactgataaggttaagcaaaaggctgatgaaactagcaaggacgttgacgaaaagcttagcaagcctgttgatattaaagcagacttagataataaagatgttcaggaaaagactaatcaaactaagcgtgatcttgattctgttccaaaagaaaccaggactgaacagaaagccgataataaggatgctgtagaaaaggcaagacaagctaaggaagagattgacaaagtacccgataaaaagaacagtaagcttgatagtactgataacactaagaaagctactgacagtgctagtcgtaatgctgacaatgcagggaagcatttttctaagctacatgagatcattaaaggtactttcattggtaactttgctgctaatgctgctcagaccgctttaggaactattaaaaacgcaattggtggactgattaccgagggcactcactacaatagattgcaacaagatatgcttgctcaatggacaaccttaactggttcagccggcaaaggtaaggaactagtaaaagagactaatgacctagctattgcagcacaaaacagcgtggagatggttaatgatttaaaccaaaaattttatgctgttactaactcgtccagcaagacaagagatttatctaaagctgtacttaccttgcaagatgctttcggacaaagcgatgacgctgtaaagaacttcgctatgcagtggtcacaaatgattggtaacggtaaggctaacgcgcaagacatgatgtctatccagaatgtattccctaagttcatggaagaactggttgaatatgagcgtaaggttactcacaacagcaagttaactaccgcgcaagttcgtgacatgatgtctaacggtaagatatcagctgatgcaatgaatactgtcctgatagggatgggtaagaagtataagaatgcaacagacaatttctctcaaactatggacggtatggaacgtactattcatgcacgtattcctgttttagctggcgctattgtcaaaccattccaagatcttaaaaatccattgcttggtaagatgagcaattggattgcttctagtggtgctgaaaagagttttgaaaacttcggtaagtcgattgctgggattatgaacggtttgatgactgttgttggaacctttgcaatgtctttcagggctaatatagctggtgctttccaagggtcacatttaggcgacataagtaattcatttagagatattggcaaggctgttactccagcactccaagcgatagctggttttgttggtgtaattagtgccaatatttttaacgtatttgctaacctcctcagtggtattgttgaaggttttaggaatatcggaaaacaacgatcttcccttgatttttcaggagtagcaaagatctttcaaagtctaagccaatccattaacgctgtgatggtttacttacgacctcttattaaagagtttggagaatttattggtatctttgccaaaggcgtttttgaaggtattgtaaccgtctttcaagacattagtaacgctattggcaaagttacctctaaagtagctgaaatgctcccttatatggatgacactagtaaagctgtaggtggagttgccaaacatagagcagtaattgaaagactgggtaaagtattcggtggactcgtaaccactgttcttgctggcaaaggtacttataaagtgttaaagacaatgagttctggaattggagctattggaaaaacagcgggcggtcttggtaaaacaatgagcgctttaaagaatggtaaaggtgtagttgaagctaccgctaagacttttccaacgctgagcaaagctataaaaggtgttaaagatgcctgggatttacttagaatagcttttatggttaatccatttatgatgaccgtagcagttattgcagcgcttggtttagctttctacgaagcatacaagcatatcaaaccttttagagaatgggttaataaagcagctgataccgtacataaatcctttgacggcatggtgcggaatgtacaagcttttaacaagtcgtttgtaaatggattaaaagtagtaattgattgggtcaaaaagaattggacaactttacttaggatgcttgttgatccaataggcggtggcctaaagcttctctatgacaacaatcctaaattcaaaaaatgggttgatgatttagggaagaatctttctaacggctggtcttcaatcaagaaaaacacatctaaattctttactgatttacctaaaaacatctctaaagggatgaaagcagctattgactggatcaagaagaactggtccggcttaacacttctgatggttgcaccaattgccggcgcaattaagttgctatatgacaacaatcctaagtttaagaagtgggtcgacagtctaggccagaacctcaaaaaaggctttgatggcatgcttaaaaacagtcacaacttttttaaaggtttgtggactggtattggtaactggggtaagcaagtatctaagaactggggcaactttattaaagggctaagtgagaatagatatgtaaaggcttttaagaaaggtaatctattcggcactctctttaaagatgctcagtccagaatgaaagactttggcaagaagtgggacaaggcttggaagaataataaaaaagcacttgctgactcattcagcaatatgcagagcaacataaacaagtggggcactaatactcacaagtggtacgacaagttcaacaagcagttcaaaaagaagtgggataacggttggaagaacaacaagcaagctcttattgattcttttgatcgcatgaaacaaaataccagcaattggggtaacaatatccataaatggtatgacaatttcaataaaaactttagcaagaactggaatcgtagctggtctgacactagaaagaatctaagtaccgcctggtctaaaatgcaggacagaacctcacgttttggttctgatatgcagaactggttaaataactttggtcctaattttaaagctggctggaagagcttgtctaaaggcgttcagaatatctttggcgatatgtgggacgcgatgaagaaactaggcaaggacgcgatgggtggcttaattgatatcgttaatggtggtattagtggtatcaacacggttatctatgcttttggtggtaaaggcgacacgattaagaagatccctaagaaattcgctagtggtactggcgcatttaatgggcctagacgtgcaatcactgaacctactttagcaatggttaatgatggctttgacagtcctgaaactggcaataaagaagctttatttagaccggctactggcgaatttggtgttttccaaggcagaaatactacaactatgttgatgcctggtgatgagatactcaatgcgtctgagaccgctatgattatgcaaggcatgggcattactcactttgcgaaaggtactggctggctaggcaatataaccaattcagtaggtagtttctttggaggtattggtagttgggtaaaagataaagttgatgatttaaagaaatactttgacttagctaagaagattatttcaaatccaactcaatacgttgagagtatcttcaacttcaaaggctttaacagtgggcaacgctcaatgaaagcattagctagtggcttattcgatcaagccaataaaaatgttcaaagtttttggaaaacgttgtggaacatggtatctggtcagttcaatggaggcgcagctaattcagatttattagcagctgcacaaaaatatggttctggccacccttatgtatggggtgctaaaggtgcagatgcttttgactgttccggattagttcaatatgctgttgaacatgcttttcataaatcattcccggctggatcaagtgcacaatatgctgcaacacagagcgtagataatccccaaccaggtgacttagtattctttggtgcaggtggtgcaaatcacgttggtatttatgccggcggagataattactattctgctcaaagtccaagcgccagccctaatattggtatgggcaagatttcagcagtacatgaaggacctgtgtcttatagacgtattcctggtatcaatgcattaggtaagtctggtgacaacgtcaaggcaaatagtggacttgaaaagtggatcaagaaaactattgctcctggattctggaagttcattgacaagctgaacagtttattcaatgtttcaattggttcaggtggtccaaattcagcacctactggagatcataagcattggctaaagcaagcgggtattcctgaaaattggtttaatggcttaaacagcattatccaacaagagtccggctggcgcgttaatgcaaccaatccaagttctggagcttatggtattccgcaatcactaccaggaaacaaaatggcttctgcaggtagtgactggagaactaaccctataacacaattgaagtggatgtattcttacattaaagaacggtatggaagtctacagaacgctttgtcatttagagctgctcatggttggtacggcaacggtggagaatttgacagtccaaaagttattggtgttggtgaagatggtccagagttcgtaataaacccacagaagtcgactgctgaccacttaattgataaagctattttgcaacgtgctaaagttgctcctgaaagtccgacagcttcattagctcggattatggatcaagtgaaatatagttcagttgccggttatggaacgccggatagtagcactatagctagccagaacattattaagcttgatgataaacgtcaaaaaattgatggtgatacagtgattaagttcattgtttctgataaagaaatggcgagagctacttatccaactattaagatgttacaagcacatgacatcactattaagcaacagggaggtgctataccagttgtctagtgtatttgttaagagattagacggaacagagtatgatcttgataaattaggctttagagtcattacatttgaaccgccaggtattaactacactcatacctatgttcagcaaagtaagattggtcaagtactaacagatgcagttattgataaaatgaccattcctctaacgttaatgatccaagcagaagatacagttgacttagaacttaaaaggcttgacttaaagcgtatctttaacagcgatgaacctttttacgtttacactagccgtattccttatctacgctggaaatgcgttgttgatggggctatttcatacccacaaatagaaaatttctggcaagctacagcaaccattaatttgagctgtccgttgggacttgctgaaacagtaacaactactgcagatagtgattttagttatgagagtggtaagtggggcttgggtcttaatattccacatggcgtggagctgaaatatgtttttaattcaagtccctgcagagtttataatgcttctaacatcgatttgaaagctgacgagttacccgtagagatcacttttaacggcaacgttaaagatggtttgactatcactaatagcaccacaagccaagtctttaaactaaacgggagctacagcaaacaagacacgattgtgattgatggtattgttcccaccgtaaatggcacagaacaatattctaagaccaatcatgcttatcttgatttcgttaaaggctggaataatttaagtgttgatggagctactgactatataattcggttcaacacccgattttattactaaggagatgatattacttgatatcaattaagaatgttgctggtaaagtagcaatcgttaaaggacaagatgttcaagtaacgtcaaccttgggtagcttagacacgttgaatttcaatttctataatctgcataccaataagatagatggtgatgttctatcaccttttagtgtgattaacgttcctgaaagtggagaagactatttactgctgacttacaatactgatgatataggcaactatatacagtactcagtaagtgcaatacaaatagccaaaaggttccactatcactacatcaaagataagattggcgttgaaattactacatcaaaagacaacagtggaagtactgatacttcaacaacttctaagccggttaagttaaaggaagctttaagctttctctttaaagggtctggctttgatgtggtaattgataaagatattaatcaaaactctgtaaaaacgtttgacggtggctttggtggtggatatgctgacgagttgctacagactgcagctaatggctatagctttgagtactattggaaaaatagaacttgctatttagcaaaagagattggtggtaaagataagtttgtgtttgtcgataatgtaaactgtaataaaatatcagttcaagaagacgacacagaaataacgactagagctactggcacgattaacataactaagcagaatggaaatagttcaagtgtaaaaacgttgacctcaacctatgtttcaccgctagttaaagaaaaaaactggccgactattgacgccacgccttatacagaaaactttacagatgatggaaaatcatttgtaatgagtcagcaactgcttgatgataaggttaaaaatctagtccatgattacccaaaggttcagtacacagttgatggtgctaactttaagaagtttgccaagtatctacatgatgtcagtattggtgactatgggtatctgcgaactaggcaaggtattgatgttgaaacaagagttcaatcgattacttcatatccgcaagatccaagtaaaggtaatataattacttttggcaatttagcttttgatttaattgattacatagcttatcatcataaccaacaagataaatatcgtgagtggtataccagcatgagtcttaaaatgagcaatttagctgaaatagtccatgaagctaatgcaggctttgatactttcacaaccaactggggagaaattcaacgccagaatatgcaaaatattcaagagctccagcaagagttgcaacagattttaaatactcaaaaagataaagatacagctgataaaggaaaagatgaaaatgatacgaataagtagtgtgaacagtccaaaacgggctgtttttttaaaaaaaggaagtgagtagatggctgacgtttttgaaaaagaaggttcacccacacaagacgcaacctatagagagcatcttgatcgtaactgggaagccggtaataaaaagtttgctgaattagagaagcaagaagaagaacgaattaaagctttagagaagcaagtagcacagctcaatttggctgtctttggtgatggtgctattcctattgatgatccgacatatcaagataaccatgataagagagcacaggaggtgcacttagattaatgaataatttcaattcaattaataatggcggcataccgtactactttccagcagatattgctaaggaaggtaatcaatgcgtacgtattagtaattttttcaaaactcgtgtaggagataatggcaaggttttaccatttaagtggtatgatcaagggcgcgtcatgaatgtgcatgggtttatcccattcattaagggttcaatcggtaaatttagtactgatgataatgacgaagtaatcatggctccagatgctagctatcgtgaatggcaaggctcgactgataatgctcacgatggtggttttgtagattacatcttggaagatcagatgtttccgcaagaaggtatcttcaaaggccactttgggttaaaagatggcaacggtaatatacttactagtgttaacgttatttttgaggtattagggaatgatctgcgagttggcgagacggttaagtactatgttggcgagctagaaaaccttaagaatcaatataaggttgagggagaacaagcgattcaagaaattaaaaaaggctataatgacgaaacagaaaatgcccgcaaaacgcttgagatggtccaacagcaagcaaatattaccaaaaacagtcaggcttctctaaatgatctcgttaataatactatggaatacatcaagtcccataacgtcgttactcttgatcaatataatgatttagctaatgatcataaagatgtcaaaaatcatacggattatagatatccgacaggtcaagctttgaacacaactatcaatttaaatagtgatccttatctggatacaggaatttataaaattggtaattgtgttattacaaatggtccatgggcggatactacaagccaatcgttttatttaactgtaatcaaatatgatgacaacaccatttaccagactattgaccaaggaccagaacgttttgtaagacttgtttccaaaacaaggaattcatatccacaatgggatcaatttgctatgatgaatagagttacggatctatctgatagattgcaaggctttatcatgcaacaaactatgtttcaaaaccgcgttgactatgagagaccatcaggaactatcagtaatcaaaccgtagactgcaatgattataaagaaacagggattgtaaagttcgttaattgtcttatcaaaaatggtccatacaaagcagactatcgtcacacaatatttttgaaggtcactaatctagacggtcaaactcaatatcagacaatatatgaaggcgatgacctttatggccgtaaattatttaatgggtcgggtcaatggcatggttacacgaatacgactctttaaatttaatatttttaatccttaaccaaacagttagggattttttatggaggaatttaacatgacagaagaaactcaaaactcagcagctgtaccagtagaaaatactgagactactacaactaaaccagaaagggaagttgtaatgcatacttattattggtcaaatgatgatgtgccttttagagttttaaggacagatgacgagattacatcaaatcaatatccaattgtagtggctgcaccagatccaaacttaaaagctccaaagtatgactgggtgaaacaagaatggattgagactagtgaagaatcattgggacagcgtttaacatccgttgttgaaaagttagaagatgctcaaaagagcattagtgtgctccaagaagctcatcaagacactttgaaaagcaatgaaacgactgatacagctatgaaacaacttcaaacaacagtgcaaatgagtacccgtatgatgtctactttaagtaccactgtttccgccttaattaacgcatatcaaactaaaaataccactggaactaaccaaggagatgcaaaatgatgtttgatacaattttaaacaatctaaatactttacagaatgaaatggttcaaatgtttaagcaacagtatgaatggggttggtttggtaagactaaacaagaatctaacttagttttacgtgattacgttaaaacaaatgccctaacgccagaaggctataaagaaatcacaggtgaagattataatgaaacatctcttaacaaatcttaatagtaattttcaaattttagcaattggaagtattcttacaagttcaacaacttcagtttctgcaattgctttatacattaagaacgaattagcttaaataaatcttagtcgcctaagaaataaacagtacgcaagggcggctattaaaggtgataaaaatgctaaagaattatcaaaaaatcagatccgatccacttaagttagttttgacaattttacaagctttgatttcgctttggattactggaattgggctatttctatatagcgatcagcattacttcttttggccaccagactggtcaaatgttgagaacgacattcgaattgacacttttatagtactagttgggctagtgctttttttatgcacaatttttggtttaaggaaccgcaagattatagcaattctactagtttgctctggcgctataagcctatcaatggctaccttgtcactgcttcatgtagtcatgtctagttactgggttatggggcttaatgttcttggagagttaattttgtttagcttagttctattagtggctcattacttataggaggtggggcgcttgcaagacttaagcaatctgttactggcgatctcagccttaattggttcgatatctgccttttatcagatcatcgcaaaaaccaagcacaacgctccaccagacaagtcagatatgagtgttgacgatattcaaaataaaattaagaagttacagaagaaacttaaggaggacaaacatgattaagaagctagaaaaagaattgaaagagttaaataccaagcgtaataagttatccaaatttttatcaaagcaaaacaaaaagaccttgtcagctaaccaattgtcactattacaagaacaaaagcaagcaatgggtaagtatgcaaaagtcttaaagctacgcattaaggatttaaaggagactaaataatgaatttcaaccaattattagaaacagcaattgtcgttttatcagttgcagcggtttttattgcttctatttatagtaagcacaaaattgagattgatagaaaagcagcacagggtgacttacttgctaagtctgagcaacttgcagctcgttctgtaactccccttgtctatcaggccgagaagaggggagggagtggcgaagataagttagaattcgtaatcaatactctcaatattcttttaactatggctcacttgccaagtctaccaacaagcttcttaaaggggctagctgaaaaggctgtgactgctatgaaacaagcacaatcaattgcagatacagtggataagcctaagacgaccattgttggcgagttaaaggaagttaagaagtaggaggtaactatgaaagttgtaaaaagaagttatggtgtagatgtatctagctatcaagataataatgcagctaattattctggtgctaagtttgcaattgtcaaagtatcggaaggcttagactatcgtaaccctaaagctggtagtcaagtatctaccgcaaaaactaatggtatattgccaatggcttatcactatggaagatttagtagcaatagtaacgtagccgttcaggaaggtaattatgcagttaactcagctaaagcagctggacttaatgtaggttcttacttagcattagattatgaacaaggtagtggtaatgaaactggtggagatgctggtgctaatactactgcaatcctagctttcttagatacgatcgtaagtgctggttaccaaccattgttgtactcaggtgctgcattacttaagtctaagattgatactggtaaggtattagcaaaatatccaaattgcttatgggtagcgtcttatcctgtatctggtgcaacaagtgaggcaaacttcggttactttccctcaatgaacggggtagtaatctggcaatttaccgataactggcgcggattaaacgttgacggtaacatcagcttggttgatcttaagactgacggtaagccagtagaccaaccatctaaaccaactattaagcaatcaacaccgcaatcttgggttgatgatattggtgatacttggtacaaggaagaaggtaagttctatcccaacggtactatcaacatcagatacggcgctagaactaccagcgatattattggtacagtaaccaaaggcgattgcgttaagtatgatgcttacagtcgtcatggtggctatgtctggattagacagccaagagctaacggagaatacggcttcttagtttgtcgtcaaggtaacgatccatgggggacatttaaatagtatgatataatttttatatcagccgagtgaggcttgataagttcctttgaagtttctgtgcttatcagtattaatgaaacgaattaaaacatgttttaaaagccactctggagcagttttgttctggagtggcttttttgcgtatcacaatttatatagtttgtaaacatattcagcaaatactaattaaattcgcgggaacttttcgggaacttttttgcttgaaacttgcaattttttgtactagttttacaactatttgtatttagcgaaagctttacgtatcaatgaaatcattgatatttagggagagtctcttatacctatcattaaaattattgttttaatgatagatccatgcgtaatattgatacttctagccttgagtctttgacaggaaaataaattaaaatgccctcaatagtaataaaaagtaataaaatacgatgacctagtttactatgattatgttttatttctttttctgccttttattttgaatacttctcggtattttaagaaatactcaacttggtattaagtatatctgaactaacataatccaagattaaaagcttactagacttagatagaaaaaaacatatcatgaataagaagagatgtacatcaactattaaccaataattattttaaagaccatagaagcgtcatctcagcactaaagaaattgctttttaataatctaatataattaattggaaaaaacttttagcttagatttttcaggtaattatagataaaaataaagttaagtaaaattatttctgactgtaaaaaatagattatgcattctaattagaatgctactaaatttaaaaataattttttaaagtaatatacgatacatatataattagctggttgatggttggctgtggatcatagtttaactacaaatgtgatatttttatattactttacataatatatattacacgaagtatattcaagattagccaagctactctcctttatatttttttaagtaaataaaaaactttgagtttcattgttctcaaagttctctatcaataattattatttatttttagaaaaagatagttttttccttttatttaaagagatcgtataaacaatattgattgcacctaaaagtaaaacagcaaaccaaatagtttttaaaacaaagatcttttgtagcaatgctgatacaattgcgccaagtgcaaatgcaataaccaaaaacatatagttaacagccgcgttatgctgtgacttatcctcaccaaagaaatatgcactccaagcaactacagattttttcaagttgccagttgtaaatgcattattataccccataccttcaattttactaaatgatgcattctgaaccgctaagccaaacgcaattacgggaactacatagtaatttggtacgtttttaggtacaaaaccaactcctaaacaaataaataaaattggaaataaacagaatacacgccaataattactttttacatatttatggaaaagtccaacaagtagcaatcctaaggtaaaagcaataaatgttgttgccctgtttaacatgcctgcaatattatgatcagcaaatgctgatgcaaagaagattacgttacctgtttgtccagcagataaagtatgtccccgttgaatataagtataggcatctataaatcccgccgaaaaagtcaatgctgtagctaaaatacgtgattcagatggacgatatttttcatctgaaaatatacccatgattaacctccaaattataatgaaaacaaattaaaaacatgatcaatttagaccatgtttaaattgtttaatcttcaatatgaatactcttaatgattacatcttcttttggtttatcatttgccttgtcacgcggaacctttgcaatttcatcaacaacatccatacctttaattacttgtccaaaaacagtgtgacgaccgtcaagccatggggttccgccttgtttatatgccttaactaattcttttggataacctgcagcatccatttctttaatcatccgtttaggtacattcttattttgaacaataaagaattggcttccatttgtattaggaccagaattagccattgagagcgcaccacgtacattaaataatttgtttgaaaattcatcttcgaagggatgtccccagatactttcaccacctgtaccgtcaccctttggatcaccaccttggatcatgaaatcactgattactcgatgaaaagtagtaccatcgtaatagccttttttagctaaacgaacaaaattttcaacagtcattggagcttctttttcaaataattgaacttcaatatctccatgattagtttgaattatagcttttggacctttcgcattctttagatctaattgtgggtattccatgttaatcctcctgaatttatactattctagtttattctacactttatttaattacacttcattagtctgtctgttctttcaagtaatttttaattgcaactaacataatttgaccataggctttaagctttgcttgacctactcccgaaatatttaaaagatctgcttgtgtttcaggcttttgcagtgacatttctcttaaagacttgtctgaaaagatataaaaagctggtatcccctgctttttagccaaacctaagcgaatttcttttaatctaacaaacaggtcattttcctctttggaaacttgactagaagtttgaattaacctttctctttttttagaaattttttgagttacacgctttttattatctaagacgtcccatcctaaattagtcacatgaactaatggatactgactatcagttagttgtaaataattatggctaattagataatttattaaatctaggatcttagtctttcccagctttaaactaccataatgttttagatgagctgcatcaatttctctcatgcgttgattatttgctcctgaaactacatcagcaaccacagtcttaccaaaacgaccatccagttcataaatagttgaaatgatacttttactttctgaagtaatgtctttttcaataaaggttcctaaacagttagaacacttgccacaaggatcacagctttgcccaaaatagctgacaataaactgttgtaaacactctgtggtatttacatatttagtaatcatagctagtttttgatattgtattttttgatactcgtcatctaaatcagattgttcaataaaccagcgatagagtcgaatatctttagggtgatagattaatatcccctcacaagcttcaccgtctctacctgctctgccggcttcttgataatatgattctaaatttggtgtactgttagcatgaatgacaaaacgaacatttcttttgtcaattcccattccaaaagcattagtagccactattacttgtactttatcgaattgaaaagcatcttgtacatctgccctctctttattagaaagaccagcgtgataactagctgttaaaatgccattttgagccaaatagtcagttaattcttcaacgtgttttcttgtactagcatatatgattccagattcatggggatgctgtttaatatagtctaaaagatacaaattagtatttttaggattatccactaccttgaagcttagattgggccttgcaaatgaagtaataacataattggcagaaggtatctgcaattggtcagcgatgtctttttgaactgagggggttgctgttgcagttaaagctaaaatattcggattactcttaattgatttgacgccatccattatttggcgataagctggtcgaaaatcatgtccccattgtgaaatacagtgtgcttcatcgactgcgactaatgaaacatttaagaagttcagctgatagcgaaaataattcattgctaatcgctcaggagttacataaagcagctttatttttccttcataggcttgccttaaaattggatttacttcttcttgaggagtcgccgaatttagggctgccgcattaataccattttgttttaatgaatcaatttggtctttcattagtgaaattaagggtgaaactaccaaagttaaaccagggttaattaaggcaggaatttgataacacagcgatttgcctgcaccagttggcattactgctagaacattttctcctttaagcaccaaattaataactttttcttgtcctgctcgaaaagttgtgtagccaaatacatcttttaatacttgtaatgatttcatttttcctagttaaataaaaaaacaagtatgaaagatcatacctgtcttttctaaaattgaactaaataataacttaagcctcaaaagcattagttaatggaggaacaacttgtttctttcttgaaacaacacctggcaatttaacttctgaatctgacaacttagtattaaatgctttttcaaacttagctttggattcatcactacctactactaaagcttctgaatctgaatcaagaatattagtaatcaaaagcatgaacatgtcgtagccttcactcttagaagcttcatccatagcctttaagaaggcttctttacgttctaaggcttctggtaagtcaacaacgttaatttgtgctacacgaacattgctaccgtttaattcaaagctcttagcgtctaaatcgattaagtcttcttctgacttatcagcaatgttagtaccagctttaagcatcttaagaccatattccttgtaattaaccccagcgatattagctaaagcttctacagcttccttatcttgatctgtagtagttggtgattttaataataaagtatctgaaataatagctgaaagcataattccggcaatatcttgtggaatttcaatttctttttcgttgtacatttgccacataattgtacttgtacaaccaactggagctgcacggtagtataaaggatcagcggtattaaagttcatgatacggtggtgatctactacgtgagttactttaaccttatcaatgtcagaaacactttgttgaggttcgttgtggtcaacaagcataactgcatcaacttcatttgaggcagttttaattacacgaggtgctgtaaaaccaaatttatttaaagcatacttagtttcatcattagcttcgcccaaagcaactgcttcagtatcgtaacctaatttgttttgtaagtatgagtatgcaattgcagttccgattgcatcagtatcgggattttggtgaccaaaaatcaattcttttgccattatatagagctcctttaaaattatatctatttaatattttagattaaaatttgaacttaagcaaatcaatccagtactaaaaagcattgcttttagttataaaaacaatgctttaaaattaaatattaactttaacctcttctaatcgactatcataatctttttcattaataaatttatcccattcatttaagaaattaactaatctaggtatttcactcttgtttttacgataaataaagcagctttcaaagtttgtttcatgttttggctctaatggggaaagcgtgattttagctttatgtgctttataaaaactctttgaaacataagtattgtaatccgtttgttctgcgaattttattagttgataaggagcagtaaaagtaactgaagctggcaactcattattcggaaattcagcagcataaaatcgacgcacaatttgaggtaagtagtaatccttaggataagttacccacttatgttgtgttaacttattaaactttgcttctgaattatgagttaaaaatactactgattcaggataaatttgcttagccatatattgtttcatgtttttaacagtcgcgttgtgatctggcatataaagaactgctagatctaattgattattatctaatttatcccaaagctctgttctattgtaaaagccaacatgtaacgttatctctggatatttttggttaaattcaatcaaaaattgatcaataaccctagcttcaatcgtagataatacacctaaggaaatagttccagtatctgattttgtatattgctgaatactatcaacagcattgttaaccgttgaaaatagtgccttagctgtttcctccatttttagacctgcatcagttaagtaaagcttttttcccatttgaccaaataagggagatccaactgcacgctctagcttcttaatttgttgagttaatgctggttgggttattcctaagatttgagctgcttgagtgtaactcatgttatcaattaattgaagaaagtaacgtaaagatttcgcagatagaactgcatcagtatttgttttcatgattgaacgcctcttatatgagaccgtaaaatagtttgtgtaaggatgaattattccttaatttaatttcctaaaacattagaaaaaggagttcctttctcgtatgattggtttgaacaaaaaaacatacagaaagaagaactccttcatgaatgattttaccaaaaatataactcaagctctattcaatcaagataaaattaatgatttgcttcgtcatgaaatccaacaagctgttaatgacatgttagaatctgaactgactgcctttttaggatatgatccctatgctagaaatggctggaatactggtaattctagaaatggtgcgtatttccgtaaaattgatacccagtttggatcaattgaggtacaagtgccacgagatcgcaatggtatgtttcatcaacacactctgccagactataaacaacatactgatctcttagaagatatggttataaagctttattctaaaggtgtaaccactagagaaatagctaatttgatcgaaaaaatgtatggcagtcattatagtccagctcaagtgtctaatatctctaagcaaatgattcctaaagttgaggcttatcacaagcgtaagctgagcgataagttcttttgtgtttatcttgatacaacgtatataccgttgcgtcgagaaacttttgaacgagaagcagtatatattgccattggcatcaagcctaatggtcacaaggaagttatcgactactgcattgcgcctagtgagaatattgaagtctggacggcgttgctccagaacatgaaatctcgtggtttaaagcaagtagagcttttcctttcagatggcgttgtcggcatgaaagcagcactggcaaagacctatcctcaagctcatttccaacgctgcttggtccatgttatgcgcaacatctgcgctaaagtacgcgtggacgatcgcgaggcaatcatgaacgaattcaagcagattcaccagcaagccaataaagcggctgctgttgatgtattgcatgctttttatgccaaatggaacaagagctacaatcgtgtcattagaaacctgaaagacatcgagccagacctgcttgttttttataattatcctaagcagatcagggcttcaatttactctaccaacatgatcgaatcctttaataacgtcattaagcgcaaggctaagcctaaagcggagttcccgactgaacagtcgcttgatacttttattggcatccaagcaatgagctacaatgaccgctacttcaaccgaattcacaaaggctttggtcaagtccaggataccttagaatcctattttgaataaataaaacgttaaaaaaacaatttacgagaaagatctatttacacaaaaaatttgacagtttctcttatataaatctggaatagcatctaattgatataaatttaaaatacatacaattattttctgatagccttttgtaaagcttattattcatcccacactttttatcataacacctgtatctagataatgaaaatatttacataaaatataagctatttttctataataatttatcttaataaaaaagctaagagtagcttttaaaatgctattcttagcttttatttaaaataggtcttctgttatatctctgccatctgctaacggttgtcccagcgttaatgaaatcggtgttccatctgtcattggatctaaaacaaatgagccatttgaatatcgatcacctaacggaaattcagatgtatttagttcaatatgacgatcactagaagtagttaaatgcaagatatgattttcgccgtagctattgattgccataatacgatgaggtttagttttaagttcacgtagtactaatacacctcgtttagctcgagttaccttgtttattaagttgagtttaagctgcttaaatgccccacgttgagtaataattccaatattaattaaatcaacatatttaggatccgcaagaacataatttacgatgtaatcgttgtctttaagattaacggacttaactcctactgctttagaaccagaggttggaatttcgctaatatcaaatctgactgcatatgcttgattagttatcaaggtaatttcttgcttactatctggtttaacttgatcaattcttacaactttactttctttactcttgagcttaattgcagttatggcacgagatttataagttctagtcggctgcaaatcagctagggtaacttgtttaatatagccatcatttgtagcaattaaaaagtttaagttagcttttaaatcattgatttcaaatactcgaatgatttcttcatcactatcaagtccgatttcttgagaaaggtgttgaccagtttccttccactttgtttctattaattcatgaactggccgataaataagatttcctttattggtaaaaatataaaggttatctaacgttgacattgtcttttcaaaaataaccttatcgccatcaggtaatccattgtcgctggtatcagtagattggaatgaacgaatagatgagcgttttaagtaaccatctttacttaccaatacgcgaacgtcttcatcggctactagagctttttcattaatttcaattttagcggctttagctgtaatttcagttcttcttggggagccaaattcttttttgactgcatttaactctttaactacaactttttccagaacctgattatcgcttaaaatttcattgaatttgtcgatctttttatttagttctgtttgttcttgcttcagttggttaacatcagtattagttaggcgatatagctgtaaagaaacaatagcctcggcttgattaggagtaaattcatatttagcgattaaattatttttagcatcttttttatctttagaagatctaattgtcttaatcacttgatctaaaatatctagtgcatgaatcaggccttcaactatttctagtcgttgcttagccttttttaaatcaaattcagttctcttagtgactacatcttttttatgagtcaagtatgaagataaaatccgtttcaaaccaacctgcacgggagtcatacggtcaattgcaaccatattgaagttgtatgaaacttgcaagtcagtattcttaaaaagatagtttaaaatattttgactatctgcacccttttttaattcaataacgattgaaagtccatgacggtcagtttcatctcttacttcagaaattccatcaatttccttatttaaacgaatttcgtcaatttttttgaccatcattgccttattgacgccaaatggcacttcagtaactacaatttgctgacggtgtcctttaatatcttgaatagtggtcttagaacgaacttgtattcttccacggccggtttcatacgcttccttaataccttttgtcccaagtacaataccaccagttggaaaatctggtcctttaacaaattccattaaatcatctgtggtagcatcgggatgtttcaagagataaacagctgcgtcaataacttcagctaggttatgaggcggaatttcagttgcatatccagcagaaattccagttgaaccattaactaataaattagggaaatgcgcaggtaggacagttggttcatattctgtgtcatcgaagttcaaaatcatttgaactgtttctttatcgatatcctgtaaaagtaaattagaaattttacttaaacgagattcggtataacgcattgctgctggaccatccccgtccatagatccattattaccgtgcatctcaatcaaaggttcacgcatcttccaatcttgagataagtgaactagagcaccataaatagaactatctccatgagggtgaaagttacccattacatttccgacagccttagcagcttttttataaggtttgtcatatgtattgctatctttatacattgcataaagaatacgacgttgaacaggttttaaaccatctcgaatatcaggaagagcacgttcttgaataatatattttgaatatcgtccaaatctttctcccataacttcttcaagaggtagttccctaattctttcagtagtttttgccatttaaaaatataacctcttaatctctacttgtttctagaattgagccatcttcgcccatgcggaatttaacattttcgtcaatccactttcttctcggagcaaccttatctcccatcaaagttgtcacgcgcttttcagcaagttgtgcatcatcaatcttaactctaattaaagtacgggtttcaggattcatagtagtttcccataactgatcagcgttcatttcacctaaacctttaaaacgctgcaaagcaaagcctttacccatatctttagagtcttcacttagctcttcatcagtccaagcatatttgatctttgccttggcgccatttcctttttgaagcttataaagcggcggaagtgcgatataaacgcgccctgcttcaaccattggacgcatatatctgtaaaagaaggttaatagcaaaatttgaatatgagcaccatcagtatccgcatctgtcatgatgatgattttatcgtaattagcatctttaatttgaaaatcagaaccaacgccagctccaatagtataaatcatggtgttaatttcttcgtttttaaagatatcttgtaatttagctttttgagtgttcaatactttaccacgcaatggtaagattgcttgaaattttcgatctcgtccttgctttgcagacccaccggctgagtcaccctcgactaggaataattcatttttcttaggattacgtgactgagcaggagttaattttccagaaagaatttctttcttacgtctctttttgccacttcgactttcatctctagcttttttagcagcttcacgtgcatccctcgccttttgagctttttgaactaaactctgggcaaactctccattttccattaagtagtaagaaagttgctcgtaaacaatactgtcaacaacacttcttgcttgtggggtacctaatttacccttagtttgtccttcaaattctagtaactcttcaggaattttaacagataagactgcacttagaccttcacggtaatcgctaccttctaaacctttgtccttattttttaataaaccctgctttttagcataatcgttaaaagctttagtgaatccacttcgtgccccagcttcgtgactaccaccatcagcagttcgaacattatttacaaacgaaacaaagttttctgagtagccatcattatactgaccagcaaattcaacctcaatgccattttgcttaccagaaaagtagaatacatctcccatcgtatctttatcttcgtttaaataagatacaaatgacttaattccatcttcataaagaaattcatcatgatgttcgggttcgcgttcatcagttaaagtaaatttaacaccctttaaaagaaatgctgattcacgaatgcgctcttgaatggtttcataattataagtagtagttgaaaaaatagttgcatctggtttaaaagtaatcgtagtaccatttttatctttagttttacctaaatgcttaagagtaccaatcgggtgaccaccattttcaaattcttcttcataagcttgaccatctctgacaactctaacctttaaataggaagataatgcgttgacaacagaagaaccaacaccgtgcaatccaccagaggtttgataattcttttcagtaaatttaccacctgcgtgcaaaacagttagaataacttcaattgttggaattcctgatgcatgcatcccagtcggcattccacgtccgaaatcctggactgtaatggaattatctttatgaatagttacgttaatttctttaccataaccagccattgcttcatcaactgagttgtcaacaatttcataaactagttgattcagaccgtgtcgatcagttgaaccgatatacattcctggacgttttcttactgcttctagtccatgaagaatctggatcgaagaatcatcatatgaactggtcgttttatttgttttagccaaataaatgcctccatttttaacagacaatcaaaatcaatcccacagctactataatctctgttaaaatagctttagattttaaatggggttgaaaattaaatgtctacgttgaattatttactagtttttattttagcatacttaattgggtcctttcctaccggtgtgttaatgggaaaaatattttttcatgaagatataagaaattttggatcaggaaacattggaacaactaattcattcagagtaatgggaccggtagccggtagtgtagttttaatcattgacgtattaaagggaacacttgctactgatttgcctttaatcttccatttaaggggaccaaagtatttattattaattgctggtgcttgcgctattttaggtcacactttttcaatcttcctaaaattcaagggaggaaaagcagtagcaactagtgcaggtgtattcttaggctacaatctaaaattttttggactgtgcgcagtagtatttttaccaatgctctttattacttcatacgtaagtttatctagtctagtttcaatagtaataatttttatttgttctttctggtttcatgatatctttctaaccattattactggaatcatgatgatcttattatttgtaagacatcgttctaatattaaacgactaatcaatcatgaagaaaatatcgttccttttggactatggtattggtataaaaaatctcatggattactcaatcgtaaatctaaaataaataaatagtaagaacaaaagactgctaaagttaatgctttaacagtcttttttcatagctattatacttcattcaaacaaatgttcgcaagactattctatatcaaattttagtagggataattatctaagcgatccttttcagtgatttttcttactacccgacctggaactcctaagacaagtgaattatctgggatatctttagttactacgctccctgccccgataacacaattcttaccaatagttacaccgggacaaacagttacattacttgctaaccagcagttatcgccaattgtaatgggagcaccatattcgatatcagcaatttttccatctttttgaagacgtgcattacgctgctcaggtaataagggatgaagcggagttactaatgaggtatttggaccgcacattacattatcacctatcgttacagggcaagtatctaaaatagttaagttgaaattggcatagaaatttttacctagtttagtaaattttccatagtcaacctcaattggtccttgtaaatatactcctgtttcatggtctggaaaaagttcatcaataattgcttttctgacttctttatcttcatcggcagtttgattataatccctgcttaagcgatgggccttcattgaaattctacttaactctttagtatctggacgatatggtaaaccggcgagcatttttttagtattttcttccattatcaaaacctagtttcttatatttatccttttattttatctattagtacctaaaatatcatatttttgttaaattgaatgcttaagattatgataattaattagttagtggaggaataataatgaaaaagatcaatttgaatgaactctatgacttaatgtacgagcacttagatcctaatggttggtggcctggaagaagcgactggcacgttatttggtcaacaattttgatccaaaatactaattggaaaaatgttgataaggctttagcaactctgtatcaagctacgaatttctggccagaaaatattttaaatctgtccgataataaattagaaaaagctattgcttctgctggcttcttcactagaaaagctgccacactgaaaagattggctacttactttcagaagtatgagtttgacctagatagatgtcgtcaattatctaaggaacagttacgtcctgaactgcttagcattaaaggaattggtccagaaacagcagatgtgatcttaatgtatggcattcaaaaaggcgagttcgtcgttgatacttatgccaggcgtttatttgattgcttagcctgtcccttaccttcctcttatcaaaaggccaaagagttagtagaagctaatgtcgatcattttactttgcgtaactatcaaaattttcatgcaatgattgtgatgtttaatcaaaaatacaaacttcccaaagaatttaaaacaacttttttaaataattatcaattaataattacaaaataaaagaggctagataatactagtctcttttgtctttgttaaagcttaattattctgaatcacgaagttgttttaaactctcgccaaaaatatcgtcaatagtagcaggatcacggtgatcgaagaattgactttcacccttgtctagttccccaatcttcgccatttcatcttgtgttaattcaaagtcaaagatattaatgttttctttttgatgttcatcatgaacagcctttggaataacaataatactcttttgagttaaccaacgtaagataacttgtccaacagttttatggtgggtttcagcaatttctgtcaaaactttattattaaaaatatcatgtttgccgtttgcaaattgtgcccaagcttcaacagcaacatttcttccttggaagaatttaacatcattagcttgctggaaccaaggactaatctcaatttggttaattgcaggcttgtcttcatgagctaattctaagttcatatattggtcaggataaaagtttgataggccaattgaacggattttacctgcacgcttagcagcttctaaagcattccaagcaccgaaagtgtcaccgtatggttggtgaagtaatactaaatcgatgtaatctgtacctaattcttttaagtcatgatcaatcgccttggtagctttttcaaatgacatatttgaaacccaaatcttagtagttaaaaagatatcatcccgattaacagcactctctgcaatagcttctccaactgcaatttggttatcgtatgcttcagcagtatcgatcattcgatacccgtttgccaaagccatttctactgtttgtcttgccttatcatgatctggaattctaaaaacgcctaaccctacttgtggcatcttattaccgtcatttaatgtaattgttggaacttctgtcatagtatagtcctccctttttatctatcagtttcattctagtgctagtaaagtaataaataaaatatatgggactatttctcagcactcttagctaaatactgcgtccagttatgttcacggtcacgattgtcagccatcacgccctctagatcatgtgctctgtatggatcttctagagcctgaacttcatctttacttaaattaaacttgatagcttcttctaaagcatctaagtgatgcacttttgtagccccaacaatcagagcatttactttagttttaagccatgcaagagcaactgcagccattgaaatattatgattttgagctattttttctacttcatcgataattggacgatcaatatcgacagttttaccatacttatctttttctgaaaaaagatcttgctttcttctagtaatttgtgttccaaacggatgggctaaacgaccactagctaagggactataaggcgttagtcctaagttattttcatgtgcgaaggtaaataattcacgttcatcttcgcgataaataagattgtaatgatcctgaattgaaacaaattgcggataattatgttctttcatataatcattcatttgagcaatttgccaggcgtaagcattagaaattccaagatagcgaactttaccactttttactgctttcagctaagccttctgcaatttcttccatgggagttagccaattccaaatatgatagatatataaatctacatagtctgtttctagatttttaagacttggattcaaagagtttagaacatgatcttttccagagaccttatctttaatttcttatggtgttctagtggcaaacttagttgcaattgtgactttatctctgctagtgagtttatttattgctgcacctaaaattctttcactagtaccatcttgataagctggagcagtatcaaaaaaagttaacgcctaaatcaagtgctcatttaattacttcatttgcctgttcttgtcctactgtccatgaacggtcattgacgttactgccacttcccttaccaaagcccatgcatcccaatgcaaattgagaaacatttaaatctgatttacctagtttttgatattgcattataattcatccttcttgtctttttcttaattatagataggataaaatataagtgtgaaatatctattgtaaatgctttcctattacttttaggcatagttcttaaaaattaaatgtataaaaatagccccaagtatatatttaaaggaggctataaataaactaataaaatttgtttcaagtattaaacctgaacgtcaataaatataaaaactaattattatcattagaaccaaaaatgagactgtaaaatagtttgtgtaaggatgaataattccttaaatttatttcttaaaacattagaaaaaggagttcctttctcgtatgattggtttgaacaaaaaaacacatacagaaagaagaactccttcatgaatgattttaccaaaaatatagcacaagctctattcaatcaagacaaaataaacgatttattgcgcaaagaactccagcaagcagttaatgacctattagaggctgaactgactgcgtttttaggctatgatccttatgccagagctggctggaatacaggcaattcacgcaatggtgcttactttcgcaaggttgatacgcaatttggcgagattaaaattcaggtgcctagggatcgtaacggcatgtttcatcagcacacgctccctgactacaagcagcactccaatgtcttggaaagcatgattatcaagctatattccaaaggcgtaaccactagagaaatagccgacttgattgaaaagatgtatggcagtcattacagcccagctcaggtatctaacatctccaagcagatgattccaaaagtcgaggcctatcatcagcgcaaattcagtgacaagttcttctgcgtttatttggacgctacctacattcctttgcgtcgcataacctttgatcgtgaagcagtttatattgccattggcatcaagcctaatggtcacaaggaagtcatcgattaccgcattgctcccagcgaaaacgtcgagaattggacggaaatgcttcaagacatgaagtctcgcggtctagaacaggttgagctctttctttcagatggcgttgtgggcatgaagacagtgctggagcagacttatccgaaagctcattttcaacgctgtctagttcatgtcatgcgcaatatttgcgctaaagtacgcgtagatgatcgcgaaacgatcatgaatgaattcaagcaaattcatcaacagccaaataaggaagccgcgatcaaagtcttgcacgccttctatgacaagtggaacagcgcgtacaaccatgtcatcagaaatctcaaagagattgaacctgatctgctagtcttttacagctatcctaagcagatcagggcttcaatttactctaccaatatgatcgaatcctttaacaacgttatcaagcgtaaagctaagcctaaagcagagtttccaactgaacagtcgcttaatacttttattggcattcaggcaatgagctacaacgaacgctatttcaatcgaatccacaaaggctttggtcaggttcaggataccttagaatcctactttgattaaataaaagattaaaaaatcaatctacgagaaaaatctatttacacaaaaaatttgacagtttcccaaaaatatctaagaactgcaagaacaagttaacaaagtctaaatacaattgaagtgctcctaatactgctaagccgtttgttgaaagttctccgccaaattgtaaataaatattcttgattctttgtgcatcccaagcagttaaaatggtaaagataataactgcaataaatgaaaaaatataatctattgttggattctttaagaacaagttgatgagcatcgctactattaagccaattaaggcagccgaagcataggaaccaattctacttaagtcacgttttgttactgttcctagaatagccattacaataaagacacttgctgaagctataaaggctgaagcaatatcttcgccagtataagcacctgcaataaaggcaaaagttacgccatagacaattgctgtgagcattagcaagacaaaactcattcctggacttcttgtagcattgaaattgatgattaatgtcaatgcgattggcaaaagtagtaaaaaccacattgcccaaggatgataattcatcagatttaccatttgtctagcaaaaacagtcattgttaaataagaacttaatgccgaaactaaaacggctaatgccattaatccataaagtctacttaaaaatatatttactccagattcatcaactaagtgtcgacgttctggattctgatcaaagttatacataatatctcctccaatctccactattcatctttaatgtagcacttagtcagaacaaagaaaaaagaaatgtattataaaatttttgtaataaaaagactgagcagttctttaaccactcagtcttacataaacgaataagttatttaatcatatgttggtaatttgtctcaaagatcttcttatcatataaatcggaaatatctaggttttcaattgcatcagatactatcttatcagctcctgatggcataattgcaaacggagcatcagttccaaacaaaacatgattaataccaaaataatttaatgcaagttgcaaagcaggcgtattccctaaaatagctgtgtctacataaaagttcttaaacatctctgcatgtccttgatttaaaatatgatcaattctaccactaaagaacggcaccattgcaccagcgtgatgaacaagaatctttaagtcgggtgcctttttgaaaatatcactttgaactagctgcagcattgcttgcgataatttatattcccaagaaaatactaaattattgtcaggctttcgattatcaaatacaggatgaagccataatggaagatttagttctgcagcttttaataaaataggttcaaattccggatcagcaatacttttttctaaatgacgtgtgaaaatttgcgctccgactaaataaggatttttttctatattctctagaatcttaagcgaggcaggaatgttgttcatagccagcatccctactccagcttcaaaatactttggatgatttgcaacaataccagctaactcttgattagcagactatgcaagcttactggcctcttctccatcaaccaagtcttctggattaatatttgcaaaggaaataacttgcttagtatttttatcaggccacttagctattctttcatctaaattaactaaagtttctatcttaataaagggatatttttgcggaatcgacgcatcaatatcaagcattgtttgataaaattccggcgttaaaatatgtgcaaacgcatcaattttcatagttattaccttctttatcataatccttaccataaatatatcgatgcagcttcaaatactgctgttcaaactttttctcacttgcgttatctttggcaaaataatatctttttccttcaagccctttaggcatgtaattttgctttgcgatctgaaagggctgcgcaaatggattatcaattagtccgccaccagttatttcttcagaatgtttatagtgcatatcacgaagtcctcgtggcatgggatgcttacttggatgatcagtatcttcgtctaatttttgccagatttcatcaaaaacacctgattttggcgataaacacatcagcattgttgcaaacatcaagggatattttgccttaggcatgccaattttttctgcttgattagctgcaatcacaatctgcgtagcttgctcaggattagctaagccaatgtaagtatatggaatctcacgcagacgccttactactgaagcaagatctccatttttaagtaaaactgctaaataatataaagcggcgtctgtgtcagaaccggctattgaatcggaataagcagctaagtaatcatagtgcttagttgcttttcgatcataagcaaaatgttgtccctttacaaattgctttacttcttcaactgaaagatcctcattaactgcatgaatcgtttctaaaagatttaatgctactcgtaaatctccatcggcggaaatggcaataatcttaaccgcttttcggtcaatattttcatctttaaaatgaaagacttcttttaaagcacggattaaaacttgttcaatatcttcatcacttaacgctttgaattcaaaaatctgacaccgtgatcgcactgctggcacaatcgacataataggattttccgtagttgccccaattaaaagaatacgtccattttctaaataaggcagcagaaaatcttgcagcgtagtggtcatccggtgaatctcatcaattaataaaacaaaggattgataaggatatgtattaatgatctgggtaagcttagccttattatcaattgaagcgttaaaagttgccaatggatagtcaaattcacgagcaataatttgagctaaactagtttttcctgttcctggtggtccccagagaagcagtgaaattggtacatgttttttaataatttgataaaggggacgtccctcttcaattaaatctttttgacctacaaactgtgataaatctttaggcctgattaagtctgctaatggcttttttattggcatagaattcgctcgcttacttatagtaaattaaatctcaccctaattattagcacagttgctggttttagacaaatttatctaacgttctattttttcatataacggcaataactgcttaatcccatccaaaataaattcttccatatcttcaatttgatcttgatttctaaaagcaaacttgcccagtaagaaacttgttttgatggcttcttcattaaacgtagtttgcttttgtgtgtcttttaaatattcattcaaggacaaatgatcagcaaattccatctcatttttgtcccataagtaccagttactaattttgcgattctttgcccaagttggaatatcagcgagtaatttattatattgttcaggactgtcaccgcgtttttcactcttataatgttgaaacattaaatatttttatcaagcattacaccgatgcaggggcttttatcagccaaagtatttaaacgataagctgcccaatagtgatcgcgtaagttccaaccatttgtccaactttcgacatgaactttagcaaatttatcttgtggcaatttttgataaacatttaagtttacctctttccaggtctgccaaacttttttaaaacttgcttttatttgcgctatctcctcttcagaatgtttctctttcagctttttaaaagcaaattcgtcacgatcaaaaattgcatacatttcttcagttaatttagtcattttataaagtccttaccatatttacactagtaacaccagttggatctggaatatcatcactagtttttccttcattatggaaaccacgttttttataaaatttaatcaattttggtaaacaagttaaagaaatggctcggcgcttttgctttttagcaacttgcaccaatgcttcaattaattttgttgcaattccctgtttacgatatgcaggcaaaacagccaagcttaatatcatttgataccgatcatctttttgattgggatgattattaaagtatagttcatcttcaatgtagcgtttattaaaagcaggaccaaaaatatgaccaattactttaccatcttcttgtactaccaaaaaagtatcaggataattttcaattcttccaaccatatcgtctctggtttgctctttagtcatcttaaatgcagcagattctagatttactacttcttctaaatcatccatcgttactctacgaataatcatggtattcacttcttcctatcttttaattaaaaaatatcatcatcttgttttatcttcaatataaaaaagcaacaaaagttagtaactcttgcagctcattatgtctactaaatatctttaactcttttttctacctgtaaactaataaatccacttcaactttgaaatcttcgtttcctggcatctttcctgattaatgtttacagaatttaaatcccttgtgcaaatataattcttttgctggattacccgttaatacttctaaataaactggtcgtttcattttacttagtgaaaactctattaatttactcccaactccttgtttttggaaagttgtcccaattaaatgtaatttagggagaaaattaggatcctttcttgcaaaataaatatcaagccatctgatagcatcatctaaatatttatttttaccaagttgatgatctttagctaaattatcagcataaaagcgatcgctatgaagccacaaaccagttaagccttgttcatcactagctagtagaatttgaccaacgggagaattatagtaagtaattttttgcattttatcacctctttccattaataatgatacgtgatttagataattaaaatatcattttaatatcaaaaattatcataaaaaatgagttttacacccaaaagtgaagctcattttcctacttttcttctaaatttttaatagctcttaccaacaattgatcgaactcatcacgctgcttctgagtaaagcctttggtcatcttaccttccatttggttaaattctttagcaaaagcagcagttcgagaatcaatatccgctattactactggcattaatttaatacgctttaatcttgaatcatctgaatcttcgattaattttacagcatttttctgaatcagatgttttactaacccattagccattggtcgcgtaattcccaaaacatccggcaagtcacgctgatacacaacttgatcttgatgatgatataaatatataactacttcaatttgtgatttaggaaaaggaacgccctgtcgcaataatatttgagcaatctcccttgacaaaagaatatctaattttttaactttattgatataattatatattttcattgatctcactataattccggtttagttctattttttaaggtaaaattgagtacaaaacaaattagcaaaactacagcggctgccgcattttatcagctaatgatgttctgaaactcattacttccaccacaacttaatcaaagcttgtgttccatcattgcccaatttcttttggtcaaccaagatttcatataaatgccttgcttcttcagtcgcaggcagatctaactgcatcttatcagcttcttctaaggcaatacgcaaatcttttaaaaaatgtttagcaaaaaaaccaggtgtataatcaccctgcaatatttttggaccatatgaatctagactaaaattctctgctacaccagactgcaaggtttgacaaatttgttctaaatttaaatgtgccgctttaacatataccagcatttcggtcatgccagtcatggttggttccagcaatcataatttgattagccatcttagcatgttgtccactaccataactgccaaaataatttaatttgctagcaaaggttatgaataaatcatgcaaatgattaaggtcttctttatggccaccgatcatgaccgttaaagttccatttttggcgccaatatccccaccagaaaccggagcgtctaagatatgtaagcctttttcttcaccaatttgaccaatcttttgtgccagactaggtttactcgtggtcatatcaacaatatattgaccagctttggcgacaatcaagataccatcctgaccaaaataaatatcttcaacatcttttggaaagccaaccatagtgaataaaatatcaacttttttagttagttcagctggattgtttgcccatttagccccattatccaaaactgtttgcgcatgagcttttgttctattatagacagttacatcataattatttttccgtaagttattaataattcctgtacccattacaccgataccgataaatccaattttcataatttttgtttcctttaattaacaatctatttaattagatgctactaaaaaagagggatgcaattaagccccctctatttattctaaaactataaatttaattcaaaagcaacgcggtatggatcaattggatccatattcttaatattaccacgttttacaaagccagcgtcttcaacaatatgccgaactacgtcgttagttcgaaaagtatcaacgcgataattccttatgccttccgcatagtgcattgaaatcaaactgctcattaaatagctagcaaggtgcatcccgcgatactcatcagaaattgcaacgcgatgaatggccacataaggatcaagatcattcttccattttccatcaatctgcttgtaattaggatcaggtccatccgtaattgcagtataaccagcaattttctgatcaacgattaagacccaagcggccccgtctttaatatcggctgtaatagtctcaacattgggataaccactttgccattgcggatttccttcttcttttaaaaacttttttgcctcatcaataatcggcatgatttgttcaaggtcatttttggctgcttgacgaatataaattagtgacatattgtctccctcctttaataaaattttatcaaaggagcaattcctttttgaatttaaaaactactctttattaatttccgataatcaaaaaatccacgaaccagttagttcgtagatctttaataactataataaatcaatatgacgtagttttcgttttaggctcccctgcttctctaacagtacaaatttacgcgataaagtttcgggagtagtgcctaaatacaaggctaaatctttcatttttaggggcaaagtaaatgaatttttattcacttgttttgcataagcctgtaaataactcaatagtcgatcttctaccttaggcaaacttaataattgaatttgcttatgcatagcacgtactttaataatattttgttctaagagttgaatacttaattctggtttctttttcattaaagctaaaaaatcatttcggttgagtaaacaaatatcactattttctgtagcttccacataagtattcgtatttgcttcaccaaataaccagttttcacccgcataatcacccgtctttaaaatctgggtaatattttcacggccattttcgtctaaagtataaaggcgggcaccaccatgagcaacaattactaaattattacttgaagtaggatccattactaattcaccattttgataattttgatggtgaactagttcttctatttgcatttgatcatttgttggtaatgcattaaataatggaactaaatgtacacataactctgccatctaaaaacttcctttagttaaaaatcatcgtcgtcatcatcttcttcagtatacaatctttcacgcaattcatgacctaaaaagttttgcgattgacggatttgttccttaatccaggctagcagttcaatcaaattagcactcaattctggccaagtttctttttgagttaaggcaattgctttagtaataaataaaatttgtgtatcaaagtcttttactaaagcaaaaagttgatcttgcccattttcgtacttacttgctccattctcctcaagcatagtatattctttaaattgatcagtagtggtaggaatactttcgccgttattaactaaaatttgatttaactggttaaactcattctgttcatatctgatccactcatcagcatgctgttctaaaaataaactagccgaacccttggcgaagaacttagcttgatctattttcaaagtatggattaataaattagcaataatgtgatccaccattgcaccagctgtaggcgtatgatgatcaatatcactttgctttaattctgccttgtatgcttcctcagccttcattagtctagctcctttgcctttacacccttgacttcatagcccatcttttcgattgctgttttaacatcgtcaacattagccttatcagcattcatcatgaactttaacttaccggcattaaataataccttgatttgatctgtaccatcgacatcttcaaccgccttttcaatcttggttaaacaagatgggcaagtcatgccacctaacttcatcattactttttgcataaaaatcttccttttgcctgtaaatccaggcttaagtgattcaagataatttaaattaataattccatgcttagaaacttgaacgaaatcgctatttagtttctctaaaacttgatataagcgatcattagttttaacaatggcactagttgtataaaaggttaactctgttttttcaacttcaactttgataatttcctctactttaatagtcaaaatccgatcttcagttttaacaggtaaaattgaagtcacctttttatcgaactttttaatataagaaattaagttacttactttctgagtttcactaagcgaaattatctttacggttatttgattatcttcaaaattagaatccgattggaatttgaccttaactgattatttcttctttctattcagcaatgatgccaagattattacaatgattgctaaaactacaatcatcccgataattactaacacattatccaaattatttaactgtagatttccaaatttgaaatgaatacctaaatactcaattaattgctggcgcatctttagcggcacatcttgctgactcattttattcaacaacaaacttctaaagcttgctgcttcataactacttggaaataattttactatactttgcgcagtttttgataaagttccgtaaggcatataagtagcaaccataaaaccggcagccgcaccgattaccgcggataaaagactgaaagtagtcgaagaattaatgaataaaacaacgattagatttaataaagttgcgccaattgcacctatttttatcccaaaagatagattatttaaaatagttcattttcccacttgataattaacgtttttcagttcaattattgtcattgattattcctttaaatcttttctttcaattatagtacttttgcataatcaagatttaagtgaaaaagcgtaaaaaataaaagtttggagctaatctccaaactttttactatattttctgttcaacatcatgaattttaaccactaatactgctcgaatccaatcaaattgtgctttcatttgatcaaaatatgcgccttcattaataaattgaccactaccgtgaatatgatacccgcgacccataccagcggttccttgataattataagaaccaatcgtaatcgttaattcatgcttaggatctttcttgaaatcctgttcaattgaatgcatcccagcagccggaatcaaaatagtatcatccgcaaccacattaatatattgtgaccaagtattaaccacactagctggattgccattgatggaaataatcgttgctggtcctttatcttctaaaacgtctaaaaaatcttcgtccattacctttgtcataaattctacctcctaaaacctttcagttttactttattccttaatcctgacaacctatgtcagaattagcaaattaatattgctgaattatttcatttaacttttccaaatagctatcctttaattcttttggctttaatacttttacttcagaacccagagatatcaaatagtcgactaaataatgtagttcttccttgttatatttaccattcagatatatttttccatgcttatggtcaatttgcatgattgggtatgaattatactcaactttttgttcaccgattttggttaactgacattgataagggatgcaataatgctcctgttcatattgccggaagctatcaagtaattgctctttattcatcaccgattgtttagtatttagtagctttactgtttcaaatttatcaagccgcaagacaaaccaacgttttaaatccaaattataagcatgacaaaaccaattccctgcttggtagaatatatcaagcaactgcaatttctgttcttctttaataaactgaaaatttcgcgctaaaattacgctattatccagacaagctttaagtagcaaagtaaaaaaggtacttcattcaagcttggctgactaatatagtgaacaaattctttttgaagactaatttggttttgtaatttttgaggtagattctttagtaatttagtctgaatcttttgatattcattactgtatggcgtttcactaagattttttattgcctgtaaagcgaaaaagatagcgttgatctcttgcgtattaaaacggatgggcaatagtaacttactattagtaatgtgataaccaccactacgcccagtttcactataaaaagctaagcctaactgctctagatcggtaatatctcgcaaagctgttcgctcagaaattgcaaatttttcttctagttcttttaaatgaaaaatctttttatcggttaagtatagtagttcttgattaagtcgttcagattttttcatagttgtgcaagctttcctgtcaaaaaatgtcagtcttttattctataataatgctgataggcgttcaggacaaggaaggtcatactatggtagatattttaactaaacaaaccagcaatcaaaaattttcatttaaatgaaatttacgttgacgatgttgaggcagcaaaaaaagatttaggtgttttagaaatcacgcctaaaaccgctagttacctagaccaccgaactcacccaatctttatgagaaagtttgagttttagcagttagttcaccattttaaacataaagaaacatcataaattccagtatcaatccaccgaaatttgtgatgttttgtttattcttttaccagacgaatttcacggtcgaataatttacgcatcccttcattgaagttatgtgcaataaaaacaatcgttgctttacttttcagaaaattctttaaaagagccctataaatatcatttgacaaaaaagaaaagcagctttatgcttaaatgttcttcgagacagggtgaaattcccgaccggcggtaaagtccgcaacccgcgcaagcggttgaacccttaatggtaccgatagttatagtctagatggaagaaggataattttaatctacgcttatttgcgtacttgaattattttttaacttgcatactatttctgaacctcgaagtttagcttcgaggttctttttttgttctgttaggaagtgatttaaatggaaaaagaccaatattatatgaatttagctttacaagaagctaaaaaaggacgcttccaaactttggttggtgctgtgattttcaaagaattgaagatcaaagaaatcaatttgctaactaataatcctgataaaattgaccaattaaacgattacggtattaagattaataaacgtattccattagaaattgcacctaatgatgttgatcgtttttacctacaaactaagaaaaagagatttcatcatttattagaactcaaggaggctgaataatgactgaatatactggaaacttcactaatacttatggaaaaatcgcgattgtcgtagctaaatttaatgaaattgttactaaaaatttggttcgcggtgctaaagaaacacttcatcaattcggaatccaagacgatgaaattgatgtcatctgggtaccaggagcatttgaaataggcttcactgctcaaaaactaattaaatctgataaatatgctggaatcatgactctcggtgcagtaatcaagggtgaaactgatcattatgccatgattattcaaaacgtaactaatgcgatcatgcagatgaatttacaagctaaaattccagtcacttttggtattttaactacagaaaatattgaacaagctttgtaaagggcgtgcttaaaagcaggcaacgaaggctcttctactgcccaaagtttacttgaaatgatctccctcaatgagcaattgtaattactaactattttatccaaacacaactaaatccaacaaaaaaactagccatgttgtaaaaacatgactagtttttcttgataacttatctttattaatgactaaattagaatcttgccatacctaaggcatgttgtgcagctaagttaagcaaactccattgacgatcaaatcctggttggaagaagaagtcttgttcagctaagtcttccaaacgcatcttatgactaattgctaaagccaaaacattgccttgagcagtaatatcatacttagaaagtactgcaccacctagaatttggtgagtgtatggattaaaggttaagctgacatataccttaggattatctgcttctggaacataagctgggcgcatgttatcttcatagaaactagtttggtaatcaagcttgttcttagcagctgagaattgatttaatccagctgtagcaaaatgatagtcaaatacacttaatgctgaggcaccaataacacctttgaaggcacggtctggcttatcctcgaagatatgatcgaccacatattgagcttctcttctagtagtagtggctaaggcaattggcattgacttaccagctggaatcgaaagcggcagaattgcatctccaatggcgtaaacgtccttcacattagttctcaagtatggatcagtcttaatccaacctctttgatctaaatcaactacgccctttagccagtcagtgttaggcattacacctgctgaaacaacaactagatcagctgggacatcaccttgatcagttttaacactttcaacttttccattaccattaaagccttcaattttgacacccatcttcaagtccatatttttcttaaaggtaggttccaaaacatcgagtaattcagaattaagataggttcctaatgggcgatcaatcatatccattaaggttacatgcttgccagctttagcaaatacttcgctagcttcagtaccgatataaccagcaccaacaatagcaacatttttaattgctggatcgttaacagcactcatcaacttagaagcccagtcacgtccacgcatcaaatagatattcttgagatcattacctggcacaggtaaaactttaggagttacgcctgaagaaagaatcaacctatcatattggacttcttcttcagaattattagttaagtccttaactgtaacagtcttattttcaggatgaatagcagttacttcatggttggcataaacatgaccgcccttcttttcaacatcttctggggcaaagtttctaacgtcatcttctgctgtaactttattttctaaatacagctgcatcccacaggacataaatgaaataaagtcgccagcttcataaacagttacatctacatcattatatttatctaacagctcaattgctgattcatgaccaccatgtgaagcaccaacaattacaattttacatttatccataaaatcctcctaacacaatagtttcttctttacagttttaatggtaacacttattatttaatatccatcgtattttgctcaaaactaatggacaaaaatcaaatgaatgttgacatctgtaaacgcaagcattaccattcatctgtaacttgtaaaaagtagggaaagagataattccatgaaaaacaaacgaattgctgctttaattgcaattgcgatttttacctttatgacttcctttaacttaaattcaccactttggctcttcgtagttacttccctattttacggagtcagaatgggactctttcaatcgccaaacaattcagttattatgtcttccgttgaccagcaattcttagggattgctggtagtgttaattccttagctcgtaatttcgggatggaacttggagtaagtctatcaaccattatccttttatagctcaatgagttttaaagctggtaaaaatatcaccacttatccagtaggacaaaatcaattatttatgtccggtttacatattgccttcatctttgctctgatattcgctgcaacagctgaataattactgttacgcgttttgtaaagagctacaaaaatagatagttaattgaagcaggtttattacctgctttttttatataaaatgaattacattaaagcaagtaattgctgtaatagcaatcatgaaaactgtataaagattttccaattttgctgatgaaattttctggttccaaactgtaccaatataaccgccaataattgaagcaatgatcaacataggaatcattttcatatcaaacatatgatattgtgcactagcaacaatcgaaatgattttggtaatttgtgagaaaaagaccgttgcaattgaataaaccgaagattgcttcattgtgaagtgaaaaattattacgaatagagacacattaagtggtccaccaccaatagccagaaagatcgaaatggctcctaaaaataaacctacaaagaaagttaaaacaatattttcctttatattattcatggttcatttgcagttaaccgtgcccatcattttgttaaagatcagaaatggtctcatgatgtaaaattattaaataaatttaccgaagccggatatcaaaatttcaagaaatagctatacctaaaagtatctaaaaaagtttctagtttataaaagcgagcaatgattttcaattttaaaatgcattgctcgctttttctaatttgattatttggttactcctaatctctgaataaaagtaaaaagacaatgaatgtaagtaagtttccatatctagaagagaaataaattatgtagttagttaaattcatatattcaactagcttaaatacttctaagcttcctatcaaataaagcaactaaaagcatcaaaataagtagtattcctgatccaataaaaatctcagcagtagacataaatttacttatcacactacttaaacttagacccgcaggtccggccaatccgatcatcattaaataaaaactaattacctttcctaagtttttatgttcaaccttatcttgaagcaatgtttgaacaggtgcatcaatcaaaggaatacataacccagcaataaaattaataataataaagattataaaaccataatgattgccgggaagtataccagaaataaacaaacttaatccgattcctagcactccaatacctgcaggtataagtcgatatgataaattatttaaatttcccatacacagaccacttaatgtcatacctaatgcaattgaaacttccactaacggcgcatcaaattttaaagatccatgaaaatgttcactaatcataagtggatataaagcagttgatggcacaataatagctacggaaaaagccttgtaaataatcaccctattcaggccagtaacttgaataatactatgaagaccttgttttaattcgaacagaaggtgaaagcctcgttgatttgcattattaacttcattcctcggaaagcatgtaattattacggcacaaatacctattacgtttgcaagtcgcaagtcctgatagtaaaagaatatagtctactggcagcaatccatataatattccacctaaaatcggcggaaagaattgattaagtgcttgaagcgaactatattgtccatttatttttaaaagcttatcatcaggtacaagttcaggtacagcagattgaatagtcggattctgaatactaatagtagttgatctaagtaaatttgaaatcagaattagatcaatcgttagattattgtggctattgattgcctgcaaaaatagtaaaagagtaacaataaggctgattgtatcagaaaaaataagtatctttttcttactaactctatctgccattacgccagcgaagagagcaaataatgcgattggtaataaagaaattatttcagaaatagataaaatagtggctgatttcgaaattgaggtaagataaaaaagcaaactataattgacagtttctgaaataatagtagctagcccttggccaataaataatcgataaaagttactagcccatgaataatatatatttttgtgcatgaaaaaaactccttacagttaaatttgagaacataactgcttggagttttccaaggtatacgcgtagtaaacttaatcactatttttttcgctatgttattaagcatagtatcataaaacaaaaaaatatacaataagtttttaacgcaaagccttattttcatttaatcaaaagtagatttttcgccctctaaaattaaaaatgtaccaataggtattaatattaaagagggctatttatcttgctttgaacacatgattaactgtttaccaaaggttttacgatccttgataattcttaacatcacctgcgctacatcactacgataagttcgaggtgcacctggcatcttgtatcccgaatcagcatccctaactaaaggattttcagtctttttgccattaaacaacggaccaggatgaacggtagtccagtttaaatcagaattcttaagttgactttcacccgcttcatggtcagaaaaattacctttcaaaaatcctttggctcccatacggtaaggataactggtattggctaaagttgtaccaacacctaatgcagaaagactaattaatcgtttgatttttgcttgatccattgccttaataatatcaggtattgcaaaactaaataatttaccactactgttagaaattggattacctaacgttactaatacagcgttacatcccttcatttcagaagccatttttgcaacatcatcaagttgtcctttaattactgttagctcaggatcatttatatttaactttgacggatttcgaacgtaagcaactaattcatcattacgtgttaaagcttgtttaactatttcagatcctgttctacctgtagcaccaattaaaaagagtttcattagcttctccttcctattaactaaaaattgtcttcaatccaattcataatatattcagttccagttgcatagccacccatttgcgtatgttgctgagcagttgaattttcatcaaacagtaagtagtccttaggacaggttaaagcatcataaaactttttcgctgctccatgagtaacctctgcggaaccatctaaaactaaagttttagttttaatattttgtacaatttttgtattatcaaatttctttaattcgttaattatagttttattatttgctccatgcttccattcatagtcttttaaaacaaagtcaatcatattaggtcgaatcatcgctggtattttaagtgctttttctaaccgtttagcaatcatgccaccccaattcatattaccaggatctgaaataataaactttaatcgattatcaaaagctgcaccacgcgctactaaaaagccgccaaagctcatacccattgctccgatttgttctgaatcaacttcctcttgtttttgagcgaaatcaataactggtcctaaaacatttccaaagtctggtctaaactttaagtcttgcagtcttaatgccatcccttgtccaggtccatcaaaagttagggcatgaattccgcgcttaattgccgcgtcagtaacccaaattgtatcatctgcccaagtatcccgtcctggaattacgattaataatggtgcctttttatttttagcaaacggcgagcggtaaaaatgacctggtaaataagtattttcataaggaattcttattgcttcaccaggataaccatttaactctaaagcacggtcataacagtctttacttctttgagaaaattcttgcattctagggtcctgccaatcaccaaaatacattagggatacacgccaataagtagaagcccgcagataactactaccagcactaattaatttgccggctttttcaaacttatgcgcacggttctgtaagtttgctgccatattactccaggcattaatccagctttgttcatcactttctttaatattcataatgatttctaagacttcaccttcatcgctcatgcgatatggcattaaatccatcacatgcttgattaatgcatcttgcaacatgtttttactatatttatattctgaccaatgtttcttaaagatttctgtcatgggttattacctctcttcttaattgttgattcaatcttagagaaaaaaggactataatttaactacaaaatgagatggagtgttgcattttgaataaatatcataagaaaagcaaaaaaactgatcaaataatagaatctgcactattaaaattaatggattcaagtgatttaaataaaattacgatgaatgaattagctgacatggcaaatattaatcgtgttactatttatcgccatttcaacgataaatgggcaattattgaacagattgaagctaggctttttacggcattaaaaaaaccacatcagaaaatgctcgatcaactagcattaaaatctgataatggtattgaatatctaactaattttttacaggtcttcaaagacaacttagtaacaattcgtattctgatttccagtcatggtgacctaagtttctcaaccaagttaatggaccatttgttagaaatggaaggattgtcacattcattgatgcatttacaagcaaataatgacttacaagaactattttcttattacagcatttctgcattaattggaattattcgtttttggactatccaccccaactattcagccaaagaaatggctacttttttctttaaaatgcgaaacggagaattaacaaaactaagttaatcaaaaacatggaaaaaacgctgattcaatattgaatcaatgtcttaaaatacaaagctaagtagtcatgtcttaacttaatgacatttctcattgattaatatattactgcagaaaatatattaaaaattaaaataattattggtagtatgaatatgatttatagtgcacttctacaaaaaaagaattgaaagcaaaactttcaattctagtgagtgggtatttaactactaaactaaattttatttaaaacgaatgattgtttatctttagttatatcgttaatgctaattgtatcatcaatcacgccttcatcactaactaaactcaaaacattatttttcgcctttaattttaaaccagaggctagcatgctaatttctctttctccagtaaataaagggaggttaaacttattttctagctcaatttcatataatggatcttcctcatcaacaataactagttgaaaagctaatacgctcgtacagctcccaacatttgagtatttattaaccccatcatttaaatcagggttaaattattatacttgaactgaataaaaatcacattttggtaaaaatgttcaccactttaccaaaatgcggcttttattttgaacttttagttcaattttgacttaataatcttcatcttcacgcatttctgcaggccaaccatcaattggcttacgttcgtctaaaacgcgtaatctcttaagatcatcattatctaattcaaaatcaaagatatcaatatttgacttaatatgagctggattagttgaacgcggaatagttacaacatcgttttgaaccaagtaacgcaaaattacttgaattggtgatttcccatatttttcgctaatttcttttaaaactggattacttattagattttgctgaccattaccaagcggactataactttcgtgcacaatattttctttttctaaaaattcgtgcatcttccattgctgcaaaaataaatgagtttcaatttgatcaaccattggacggacactactttggtgaattagatctaaagtttggcgactattaaaattactaattccaattgcgcgcgtctttcctgctttatatgctgcttccagtgcatgccaagtatcaatatcatgtcccatcggccagtgaattaaaaccaggtcaaaataatctagtccaattcttctcaatgattcatctaaaccaatcttagtatcttcataaccatcagtcatcgttttagttgtgataaacacctcatcacgatttagaccgcttgctttcaccgcttcgccaacttgttgttcattttgataatattgcgccgtatcaattaagcgataaccttcttcaaaagctgataatactgcttgctttgtttgatcaggactaatttcataagttccaaaaccaaaaattggaattttaacgtcattatttaatgttaattgcttcatatcaaagttacctcaatatattttttcagtttatttctataatcaatcatatactaaaaatgattatttatttctattaagcattcgaatatcaaaagtttaactataagttaaattatgtcccatttatctcgaaagtttaactatagttaaacttttacccaatttcatccattttttaacttatacacaaaaaagagctgctttctcaagcaactccttaaatttattttttattctccggtctaggaccaggcttaggtcccattgaaacaataaaactaacaattggaaatcctagatataaaatcagcttctttctatatattatttcttaaattgattatgaacgtactcagcataaagcggtgttgacttaactaattcttcgtgcgtaccagaaccggaaactgtaccatgatcaatgaagtagattctatctgcatcaacaatcgtacttaaacggtgtgcaatgactaaagtcattctattcttcattaagctggttaaagctttttgcaccattgcttcagattctgagtcaagactagcagttgcttcatcaagcattaagatatttggatcacgtaagaatgcgcgagcaatcgcaattctctgtctttgaccaccagaaagttttacccctcgttcaccaatttgagtacccaagtcatcttctgattcttttacgaatttatcagcatatgccatctttagtacacgccatagttcgtcatcatttacttcatgatctaatccataaactaagttttcacgaattgttcctggcattactgcagaattctgaccgactaaaccaatttgatgacgccaattagttaaatcgatattgtcaatattttcattaccaatcgtaatcttacctgaagttggtttatagaaacgttcaatcaatgagaaaattgttgatttaccaccaccagatggtccagcaaaagcgacaaccgtatttggtttagctacttcattaatgtcatgcaaaatttgcttatctttttcataagagaagctgacattttgcaattgcaattctttacaagcaacatcaactttttgatcagcagcagattcttcaatgggttcattgagcatttcacgaatacgttcagttgagcctgatgtcttggctaattcgttaaagaattagctaaccataattactggtcccattaattggaacaagtacattaaaaatgaaatgagggcacccactgccttgcattacccgaattgcaccataggttaaaatcccgattaccaaaatcatcattaacatgttagaaattggttgcatcaaggaattaacccatgattctcaaaagaaaatatttcttgttaattaaatcaaatatttttctgaattcaaataccacttctttactaaagtagttaaagcaatatataagattaacaaaagaaatacaattgctaaaaagtacattggaattgggccaaattttattgctttagctattggtgtaataaatggtaagacagttcccaccactgccataccgattgttgcccaagtaacaattgctgtagcatgttgcttaataaatggtaatttgggatctctaagtgcatgaataaccatttcttgggtccaaagtgattcaataaaccaccctgtacaaaagatggctgagaaaattaatttttgcgttgcgccagctgctacataactagttccaattacttgcggacaaaccacaaagaaaagcaaagcaaaagttatgatatcaaaaatagaggacgttggaccaaagtagaacataaacttcggtagcttctttgtactccactttctaggctctgataaataatgcttattcatagtatcaaatggaatagataggcaactagttccatacatcaagtctaaaattaaaagttgaattggaagcattggtaggaatggcaaaaatgaagaagctactaaaattgataaaatattaccaaaattagaagaaagcgtaattttaatatatttcatcgtattgccaaatacttgacggccaatttgtactcccttttctaaaatcattaaatctttgtggagcaaaattatatctgctgactttttagcaatgtccaccgctgtatcaactgagatagcaacatctgccgctttcattgcaggagcatcattgattccatctcccatataagctacggtatgaccatcttgtctaagtaagtcaataatttgagctttttgttgtggggataatttcacaaaaacattgcatgcttgcaccatttgttttaattcagcgtcagtcttattttcaaggtcttttccctgataaactcgatcaatatttaaacctacttgctttcctacatttcgcgtaactgcttcattatctccagttaaaattttgactgcaatgccatcttcttttaaggcagtcaatgctgctttagcactgtcttttggtggatctaaaaatgctaaaaatccaactaagactaattcattctcatcatcaatgctaaattcaccaacaggagctggattttctttatatcctaaaagaacaacacgtaaaccatcctgattcatctcatcaatttcagttaaaattttctgacgttgatcttcatcaagtggacttattgaaccatctatttctactctattagaacaagcaagcatttcttcagcagcacctttagttaccaaaatatgttcgtgttgctggttcataacgacaacgctcatgcgtcttctcttaaaatcaaaaggtatttcatcaatcttttggtagttttgattaattttctttgtatctagttctccttgagcagcgtcaataactgctttatcaattaaatctttcatccctgtttgataataactattcaagtatgaaagctctaatacttttgacttttcttctaagtttaaattatagtgtcgttccaaaaccactttatcttgtgttaaggtaccagtcttatcagtgcaaagaatatcagctgagccaaagttttggattgaattcattcttttaacaatggtttcatgcttagccatttcaatagaccccttaactaaattgctagtcacgataactggcaacatttccggcgtcagaccaacagccgttgcgatagcaaaaattaatgcatttagccaatcgcctttagttaaaccattaatcaaaaacactagtggtgcaattacagctgtcatgattagtaatattttagaaacatttttaattccaatgtcaaaagttgtctctttgtttttattctgagcaagagtacgggccagatttccaaaaacggttttatcacctgtagcaaaaacgacgcccattccagaaccagaaacaatatttgttccttcataaaggatatttggataatctaagtaattatcactttcttttggcttctgatctgccatcttttcaactggacttgactcaccatttaatgagctcgctgaacaaaataagtctttactctttaacaaatacatatctgctggcactaaatctccagcagctaaattaataatatcgccaactactacatctttagttggtaattctttatcttcgccagctcgtttaacatttgtagttacagaaaccatatttagcaatgaatcaaccgcatcacttgtttttacattttgaataaaactagtaattcctgaaatcagaaccatcataatcatgataattacggtactcagatctttttgatcagctggcacaaagacatagttagttaaaaaagataaacctgctaaaaataacaacacgcctgtaaaaggtgtcataaaagcatcgattagaaaatgtaattttggatgatgttctttattcgagacctcatttaagccatcttgccctaaacgttgctttgcttgaactggatttaatccattaattgttgtatgcaattgctttaagacttcatttttttcttgtctagcaatttgcttagccaaagtcgcattagttactacgcgatctttagagttgaattttaacatagtaatctctccctctaaaaaatcggcaaacaaacaaaaagaccaacgcaaaaactgcattggtcttaacttagcgatttatactcgtcgttcagttttaacactacgtaacgtgaagttttttaactagctgactgggaaaagccttaagtcgacaattactgtttaacccgttggcatctctagatgttgctgggcatcagcgtatatttacgtaggagtctcacctaacagttcatttgcttctttattcaactaacggttaatagattaaacaattattctttattattcaagcatttttataaattctttacttttactctaaatccatacatcaaataattgccatcagtttgagtaattatcgggatattaacttttggattgtatgattttttcttaataattctaaaacctaaatttgcataggtatcagcttttgcctgcggtaaatctgtaagaaaacttgataaatttttatttgccattatacgcacacctaattcttgataaaactgactatatgtcgaagcaatttcagtttcagaacaatcgactttaaaatccgaacacccaaaatcatgatcaggtaaaaaacatttctttaccatataaaaatcgacattggttaattgaaagttatcattttctttttgacgtaaaatggataaatctgcttcaaactttgaatgcgcaattcaattttattttttaaagggattaattttctattcaaggcaaccctgctcgaatcgctcaagtaatctttgatttcttctactaataaaagtcctaaatcacgcagtcctaagataaaactaatttgatataactacttataactataataacgatagccatttttcttagtcttcattggtttaaaaatatctttttgatcataaaaaattaaagttcgtctggtagtaccagcaagtttggcgctgatacattatcttcttctcatcgccttccagatgaaatgtggagccaagaatatcaaaatgaatattatcaaatgtattttgatatatttaagaaatatccatttatttgtggcgaattagtttggaactttgctgactttaagacgagtaaaggaattatgcgtgttggtggcaacgataaaggaatttttactcgcgatcgtgaacttaaagatattgcctttaccttgaaaaagagatggcaacaactaaattaatattttagttgttacaaataatcgtgttcaatcaaaataatcgatatcattttagcacatttgatatcgattatttaattatgagcgcaattttttaattttgatacaaatttctagctaattttaatttataaaactaatatcctgtttcttgaacaagtcaaacacgatcaagtctgatgaactcaaatcttccttgttcatgtctacagcactaattctactgtcatcataacaattgaagtacaaaatacccttttcaagattcatacaactagtatacatggtgtattcaaaaatattaggaccaacttcatccatcccttttacctgttcaacagactgcaaaatatggaaaaaattagtaacactttctacctcatcactatcttttggtgcatgattcaaagcaaaacatactttaacaaaacgtgattctgaatccattccaccaggtaaatgatgagttcctaagctgcggctatacatcttaagatcaactccaggtaaaaaatcattattaggttggccgggaacaactgcagcataatttgccaaattagttaactgctgcgggaataacggtgcgttcgtcaaagcattaactggattatcataaacatgtaaacctttttcatctgactcaacaacgatactcttaccggtcttatctcctactagccaatgaagttctgaagctggtgtatttttagaaaaactcacatcagaaatattaacatcagtcaaattttctttaacctgatcaacagtttcataagtagctaatatataagaaataaattcaaatgaagcaatgtttttcttatcttctactactggaaaatactttccttgtccagcaaaacttaaaccagctactcccaaacccttttcattaatcgcatcgcaatatagtggggtattatttgctacagcagctatgccaatcattgcataatgtgatttttcagctggtaaattggcaaacttaaattcataatttcttggtgtaataaccactttttgaccataagcaatttcataatctaagtttctaccaaaatagtggtctttgggactatataaaattgatgtacacatattagatttctcctctgattaaagtaatcatttcacttcatattctaatcccaaagaatatcaaaatataatatttcgattacatgaaaaaaaggctgattttcacatcaagcccttaatttagtttgtcatattcttcatcagaaaccggtttaagccatgtattcttactatctcctaccatgattgctaagtgtgcaaaccacgaatctttagtagctccatgccaatgcttagtattagggtttacaattacaacatcacctggaaccaacttttgtgcaggcttaccttcttcttgataccacccttcaccagcaactgcaattaaaatttgtggaactgagtgcatgtgccaattgttgcggcatcctggttcaaagctcacattatgaaccgcagtcttagcttctttactttctgctaatggcttaagataactagttcccttaaaaacttagcaaaggcctcatttgaatcaccaaagccaaaaacactattttttacttcttcttcattttttgctatgttattacccccatttctaactttgcttttattttagaatagaaataacgtcatgcaaaatatttatttgtaatattatattatacatttaaggtatggatgataattattcataatctttgggatcaatagttggcttgggtaaatcagaattagacgaaagttcaattccttgaattccattagaaagtaatctgcgtcaagtaggtagtctaaaagaatttactctttacttaaataaatttctcgatcaaacatctgccgcatatgttcgttaaaattatgagcaataaatacaattgttgctttactattaagcaatttttccaagatattcattgttgctttttgatcaattgcgctagttccttcgtcaatcaagatgatatcactatcatgaatttttgctctcgccaaaacgatcttttgtctttgaccacccgaaatattaattttatctaaatcaagttcttcattaattccatttttaaattttttaatatctttattgaaattaacttcattgacgagaccgtaaaatagtttgtgtaaggatgaattattccttaatttaatttcctaaaacattagaaaaaggagttcctttctcgtatgattggtttgaacaaaaaaacatacagaaagaagaactccttcatgaatgattttaccaaaaatataactcaagctctattcaatcaagataaaattaatgatttgcttcgtcatgaaatccaacaagctgttaatgacatgttagaatctgaactgactgcctttttaggatatgatccctatgctagaaatggctggaatactggtaattctagaaatggtgcgtatttccgtaaaattgatacccagtttggatcaattgaggtacaagtgccacgagatcgcaatggtatgtttcatcaacacactctgccagactataaacaacatactgatctcttagaagatatggttataaagctttattctaaaggtgtaaccactagagaaatagctaatttgatcgaaaaaatgtatggcagtcattatagtccagctcaagtgtctaatatctctaagcaaatgattcctaaagttgaggcttatcacaagcgtaagctgagcgataagttcttttgtgtttatcttgatacaacgtatataccgttgcgtcgagaaacttttgaacgagaagcagtatatattgccattggcatcaagcctaatggtcacaaggaagttatcgactactgcattgcgcctagtgagaatattgaagtctggacggcgttgctccagaacatgaaatctcgtggtttaaagcaagtagagcttttcctttcagatggcgttgtcggcatgaaagcagcactggcaaagacctatcctcaagctcatttccaacgctgcttggtccatgttatgcgcaacatctgcgctaaagtacgcgtggacgatcgcgaggcaatcatgaacgaattcaagcagattcaccagcaagccaataaagcggctgctgttgatgtattgcatgctttttatgccaaatggaacaagagctacaatcgtgtcattagaaacctgaaagacatcgagccagacctgcttgttttttataattatcctaagcagatcagggcttcaatttactctaccaacatgatcgaatcctttaataacgtcattaagcgcaaggctaagcctaaagcggagttcccgactgaacagtcgcttgatacttttattggcatccaagcaatgagctacaatgaccgctacttcaaccgaattcacaaaggctttggtcaagtccaggataccttagaatcctattttgaataaataaaacgttaaaaaaacaatttacgagaaagatctatttacacaaaaaatttgacagtttcaaaaaagcagaatttagattactttcgaactaaattctgcttttaagttttagataaatactttttaatacaaagttgggaccaacccaccatcaagtcttaaggcttcaccagaaaatgaagatgaatatgggctcgcaacaaaagcagtagaccttcctacttctgctggtctaatcaaacgttgaatccgagataagggacggtgatttttcataaagtcactttcccattggtcctttggtaaatcagaatctttgtacatatcgataagcatctgttctacgccttcagttaaagtcgatccaggcataattgtatttacagttatatgcgtgcccactgtcaacttagataaacttttagctaaagacaagttcattgtcttagttaagctatactgtggcatttctccagatggcattacagcctcttcactagcaataaaaataatccgaccaaaatcttgcttaagcatcttaggtagataaaactttgctaaagcattaccagaatagaaattgacatcaataaatgttgccaagtttcttctgatatatcaaagtaattcattggcttgaaaattcccatgttattgactaatacatcaacttgaggaatctatttaaatagtttttctcgctcctcagcaatcgaaatatcaaaagctgcaccttgaggattagtaccgggaaatttctctttaatttcactaacgacttgatcagcagtgttttttttacgaccattaataatgacatcagcaccttcacgtgccatttcaattgcaattgcttttccgattccgttagttgaaccggttattaaacttacttttcctcataatccaagatccataatttacctccagtattttgacttactttttgttagcaataattatagaccaaaaagttgttctttgctagcaaattatcagaggtatccttaatttcacttaattgtaactactctgctatgtttaaaagcataatcagatatttcattgccaatccccggtcgatcagggacagtaaatacaccattctcaggctcataatcatacttagtcaagctaagcattttggacatttcagtgttgatattatattcgtggatgacaaaattaggaattgcagcttctaagtttaatgaaacggaagttgctaaattacttccagctacatggatctgcacaccaatctcatttgtgtctgccatatcgcagatctttttaacttctgttacacctcctgcagtacagatatctggctgagcaacttggatgctattttgataaaaagtacgtttgaaatcccaacgagaatacattcgctcaccagaagcaatatttaaacctgtttcttgatgaacataacttaacaaatcgggatctggctttactggctcttcaaaatataagatattgtattttgaaaacatcttgccatattgaacagctgataatttatcagttaaagcatgattttctaagatcaattcaccattttcttctaaaacattacgaactgccttaattctctcttcggctaagtttaagtaattaggtgataaaaaggctgtctgtctttgccacggaatttgttttccctgctcatcaaatgttaaaaagttaattttaacagtcttaaatcccttttctaaggcaatttttgtattatttgcatagtcttgaggcgtcgctgctggccttcttgactctccccatcccatttggagctgactagcataagcttttaaatgatctcgttgtttgccaccaagtaattcccataatggagcatgataatacttccctttaatatcccataaggcaacatcaaaagccgaaatagcaccaaaaattacaggacctgcatttttaccaaaaaagctatttctatacaatttctgccaaacgatctcatgttctaatgggttcatcccgattaacaagtgagctaattctttcatttcagcaaaagctgcttcttttgctccgccataagatagagcaacttcaccatcgccataaataccattatcagtataaatacggcaaaaagacggtcgccaattatcttctactggatcactatataatagatcaattttagttatcttcattttttctctttacttaacataaataaaaaaatatcaaactaaaccgtttgatatttttaatattctatcctacaactgaaaagattctaacttctggatcagcagtccaagtaggtttcaaacctggaaaaacatgcttggtaaacatttcactctttagatagtcttctgcatgttctactgaatcaaagccgtgtaatacctgcacatcttcatcgcgaacaagtaatgccttactttcagcgcctggaattgtttctaaaaatgatttacggtaatcactataaacctttgcagctgcctttctattttctgctgggatctgcatcgtaacttctaaataagcttttactgccatatcaattttcctttctgctttaatcaacttacatttttatagtaagataaagctgaaaagaattatatgttttaaaaagagttttagctactaaaaaattattgagtgaggctaattatgtatcaaagaaaattaccaaaagaatattattgtacagttgattatgcattagatatctttggcggaaaatggaaaccaagactcttatgtatcttaggtcacaaaaaatctatgagatatagagaaataaaagatcagatggaaaatatctctgatgcagcacttgcagattcgctcaaggaattgcaacaacaaaatattattgaaagaaagcaatataatgaaatgccaattcgcgtggaatattcattaacaaataagggaaaaacgctgctaccagttttaaatacaatttcaaattgggccattaaaaatagcacccctgatatgtataaagggattcattttgaggatgtgcataaagacttgtttaaatagaattttctacttaaaattcaaacacttcaactgggtatcttaaacaatgcagatttattctttatattgttccattcgttgattaaactctgctttatcaaacttatctaaatcaattgcctctccacccattaacgaatcaatcatttcaggatctacttcaaactcccagctatcgccataattataagttaataataacttattttccttttcaaaatacgagaccttagctttttcatatctattcctgtagctggatatcaaactagtgtcataacgtgtttgaagcatgtctttctcacattaaaaaactatctcaatcaattttagtattatgaattctaattttgaaaattatttacatcaaaaaagacgctcctaaatagagtgtctaaattttaatggctctataataaatcctgttgatggatatctatgatattctatcgacaggattttttactgcataaataaagaggccataagcctcactgcattaaatcttccgattccactctaaagaataaaggtgattgcttatgtcctctaacaatgattgtattaaatttaatctcaatattgaagaccctaatattgttctttctgattattttaaaaaatatattaatggcaaatatcatagcgtttatcaagccgagcttattcagccttcttgtcctttttgccattcagctaatcttaaacataatggacactatacttctaacgtgcgctttattactgctgatgctagccatccagttattatcagacttaataaacagcgtgttttatgcaatgactgccttaaaaagatctatggctcaatctagccttgttaataaatattgtcacatctccaacgcatctaaacgtaaggtcttagctgctcttacagaagatcgctctatgaccagtattgctcgtgagcataacctatcagttaatactgttcaaagagttctggaatcttgttcttctaggttctacgatgatttcgattatcctcctgagcatttagcttttgatgagtttaaaggcgttggcaagaagctgcattttatttgcttagatggtgattctcaccaagtcgtccagatccttagaacgcgttttaagcctgagactttgcgctacttcttctcccctaaggctagagcagactgtaagtatggatcttaactgctattatccaatcgtggccaaagagctttttcctaatgctcagattgttatcgatcgctttcacatggttcaaatgcttaccagatctttcaatagcttacgagttcagaaatgaagctttttaagaagcaaagccgtgaatataagctattaaaatctacctggaagctttatctcatgaagtatgacaagctcaataagaaaacgccgtactatgactgacatttcaaagactatctgactcaagagcacgttgttttagatggcttagactgcaatgaagagcttgaaaacacatattgggttatgcaggactttatggctgctattcaaaacaaagatgaaaagcagattgttcacttacttcactcaaaacaagctgtcggtaaacaaatgcatcaagcattattaacctttaagcataattataccggtgttctcctcgagttactccaacggctgtcttgaaggggttaatcgtaagattaagcaaatcgaacgaactgcttacggatacagtaactttaagcatttattaattagaatcagacttgaagaaaatatcataaaagaaaaagaaccaaacagcttttttcaagttgcttgattctcattcaaaactattcatcaacaggatttgcaaaacagccagttttcctttaatcttcttctaaagttgaggctactcttttatttttaacaaaatgaaccactaatccaattgccaaaccaactaaagctggaacaagccatgaaagccccatattagctaatggtaaatggtttcttactgaagccactgctaaaccaaatgaactttgacttacaacacttggaaaggctacaaccatgtcgcccaaagctggaacaactgtaaagacgattacaaagaagtaaacaactccgtcagtcttaaacaatggcgagcagacagataacaaaattaataccattgataatgggtataggaacatcaacattggagttgaccatgcaatgattgtgtctaaaccaaagttagcagctaagaatgaagctaaacagctaagtgctaaccaagcgtggtagctaacttgtgggaagtgtttatggaagtcttgcgcaaaagcagcaactaaaccaacagcagtggtcaagcacgtaacagttaataagaatgcaagtaaagcttgaccgaagacaccgccataaacattaacaatttggttaaatgcaacaccaccattgtctgaaactttaaaacgacctaaggacactgcacccattaagatcaataataagtaaataaaaccgatagctagcacagctagcaaaccagacttagcaacaacttttgaaacacttttagcattcttttgtcccattccgcgcactgctgtaacaacagtaacaccgaaggctaatcctgctaaagcatccattgtgttgtatccttctaagaatccgttcactaaagcgccatgcttgtaagcagcagttacagctgcagtttgcgggttacctaatggacgagcaaaagctacaaggaatactaagaataatagagataaaaatagtgggtttaatactttaccaacattagataagatgttgttttgatgatatgagaaaccaaaagctgctaagaaaaacaaagcagaaaagattaataaggctgttccttgcatatttttaggaacaaatggtgcaatcccaactgtaaatgaaacagttgcagttctcggtgtaccaaataaaggaccaattgtagcatggatcaaaaccataaatacaactgcgaaaccagcacctagcggttttccgatatcataaacgccatcagcatgagtaattgcaacagctaaaacggataataaaggcagtaatacacccgtgattaaaaatccaactgcggcagtaccccaatttgctccagcaagttggcccaagtgcaatgggaaaatcaagttaccggccccaaagaataaaccaaatagcaaagaagcgactactaaataatccttccatgttaatttccgtgatgtatgatctgtcatcatattctttccctccaaaaaaatatctctgaatacaaaaagtccctcaactaaattacttagttgagggacgcttcagcgtggtaccaccctttgttcgtattgctatcactagtaatacctttcacgtgcagtcaattgcttgacgatacgtagacactgtaatgggtgctcccacttcttcttacttagaaattaagaatcagaactcgaaagtgattttcacttaatcttagtaattatctcctcacacctcacgagactcgctgaaaattaagattatgctactcttctttctctttgttttcagattaattaaatttgttaataatcattttaatataaacatcataaatgtcaacaattttttataaatttatttcttggctattcaatattcataatttaaaaatatgcgattttttaaatcttcaataagcaaccaacttttttaatcaagttacttaactatattatcaccagataaggtacttaaactaatagtgcctgtattatttgtactatttacttctgcccttgttccattttttccgaataatgaattatctccacttaaagtacgcagttgatatttagcagcttttacatcttcaactaagttatcgcccgaagtagttgaaaccttaaatttgtcaagaactaaactatttttcagtgtaaaatcgccacttactagttgggcttttccttgctttactgtaacttctttgagaccaatatctcctgaagttgtagttaatttaacttcgtcagtttgtactgttcttagacttacatctccacttacaacagaaattgctaaagaatcaagacttaaactcttaaaattggtatcgccacttaccgaagaaacttttatcgcacttaaatgatgaccctcaggaactgtaacaattaagttaccattatcactttgactaactatatttacttcgacaaagccttttctccaaaactttccgtgctgatgatctaattttggttcttcaatttcaagtgtatcatctttaagctcaacgctcggcttttcatctttaggtccataatagtgaacttcaaacttatcaccagtttcaactttaagatcaagattaattaaatcaagatttaaattattaaaactatcattactcaaaacctcgttaataactttatctttactttcatcacttttattaaaaaacattttatgtacctctttttttattatttactcattagctttatttaaatttaattttactatcatagagatgcttttcaatgaaatttaactaagtggttaaaaattatacctaacatgcaaaaaaaggcagcctaagctgtctttttatcgattctatttaaaaattaataatagtcaataatttaattgagtcatgattgctcattatcaggagtaattactgagacaatatcaacatattctaagactgcatctataccagcattttctttagttaaagtaagtacatcttttatcttgactcttaattttactaatcttattcaaattgagtatcccagtcaggatcattatttgcatcaaagcacattgcaatttgttctttagtatttcgatcaagcgacaatttaggtaagttatctaaagcaaaatattcgcatgcgtctgtttcatcattaggtgtaaattcaccacttagttctttacacaagaaaaagattttggtcacgtttgtagctaaaattggcttattgtggtggttgcgatcttgaaccgcaataattttaagtggcttaacttttcttcctgattcttcgaaagcttctttaacacaattttgagcagtggtttgatcataatcattccagccaccaggcaatgaccactcctgtgtctttttttcacgaacaagcaatattctattatctttaaaaattgcagctcgtgtatcaattttgggtgtttggtaaccctcatcacctaagaaaagagttttaagtttttcttccggaattccagttctagcagacatcatttcgccagcaattctacgaatctcttcataacgttcacgatcaaaaacatcatgcccatatcttaatccagcttgggctaaactttgtaagtccattgcccaatttgcaatttgatcatttgtcttcattctttaatcacctaaaattttatagttaaattaatgactagcgacataatcttgtaattcgcctagcttatcaattttaaacgtaaaagcctgcatgcctaacttctttgctgcatcagtatttgctttcaaatcatctataaataaactctcttcaggctttaacatataacgagcaattaatttttcataaattcttctatctggcttcattagtttttcttgagcagaaaaaacatagccatcgaaataatttcccatttcagagtttttaacaaaatttgcaaattgcatccctgtattagataagccatagatcttataaccatcttggcgcaatttttccatataattaaagactggttcatagaaatcaacattttctggccaagttgccataacttgcttaaccttaccctttagacgatctggtacacgatccataaagatttcagttgcttctttttctgaaatctttccagcgtcaatctcgctccattctttagattcaaaaatactctttcttaataaatcatggtctactggacttaattcataatgattcaaaatttcatcgggactataattcatgatgacatttccaaaatcaaagataatatttttaagcattaacttaccttctatctttaaagtctataattaaaatatgcgctttttaatgaaatcttgcaagaaaatgcaaaattaattatatagacccataatcttttatttcttatcccctctattaagcataaatatcaaagttaataaacctgtaataatatcaatgagtttattaacagtttgcgaagaattcaattcgttagaattatccataatcgttggttttatttgtttaaactgctctcttgtttgacgtaatttttcatattcttcatttagatctgaactttcttgactactctggttatcgctttgttttttacttagtccaatagtaaatatctgaggaagaacaccgtctttaaagtattgtttttcactattttcgttaaagtcatcaaatataactttatatccttgttctttcaatacttttaatgggatttcagtactatataaatcattaattgattctccaactcgtccagaaagttttccagaagaagtaatagagtgaccatgatcatctatatcaataaaattaataattgctgtttgaactttattatttttcgaatcggttttttggtcaatatttttacgaactactgtagtttgagaatctgattcatgatcgtgatttagattaatatataaagtatcatcattattatttattttttcataaactacagttaaatcttgccctggattggctggagttactgtagcgagagttgcttgatagccacttactttcggcacattttgatcgtttttaactttacttgcatcactagagtctgatacaaactgaggcgttggtgcatctggaatagcaacacccgcttcatcaactggaatcaaatgaccattagggtggtactgaactgtaatggcttgatcatctaaagtcatagattttggtttaatcaaatctaaatcagcgtgataaccctgaacaacgggaactttaatttcttgatatctttctttatccgcatgccaagctttatcataaacaccatgagaaattacttttttggcagctttattaatcgtaatcgttcggaaccaattagttgtttgaataattttatcgggcggatttgagcatccctcaaaattaacaatcagcttactctttctatgatataaagatggatcaacccattctacaggattatttacgtttacagcttcaatagcagatataaaagtaataataaaaaccgggcagtagtcatccaaactgccaaaaaattggacatctccgttatgattaaaatcattagctactaatttatagccttgttcttcaaaatgcttgattttaagttgaggatcataattaattggtgtatttgctaaaccagaaacagtatcttctgtcagcaattgattattattagttaaatctacatatctaatttttgccttttgtattgtattagttggtttcatgttgagcttaaaagaaactatatattctttatttaagtcattaaccgttaccttttctccaccaactactactcgatcgggaatataacctggaagtgttggagtaccaattaattgcatactcttttcttttggctgaaagccatgatcttcaactactttcccactttttttattaatgatataaacatgactaaaacttaccctcgtcacattatcttgaggatttcggctagcagcacctacataatgaacagtttgcgtaattgtttttaatagtttttctttagtaaaaccatatccaggatgatttgcatcgatcaccacatgttcatctatattttcattctgattaaacttatcatccatcttttaacctctatatataaataaaaagtatcttatagtttaattttagcactcacaaaagaaaaagggactgacttaaagtcggtctcctttctctttagtgtagcttatcttgccttttttctctttttaacaccagctaaaccaattaatcctattgataaagcaacagaaccaatcacttcatcatcaattgattgttgagcgttactacttgtttgtggcaattctttatttgaatttgctgttctatttttagtcagattggttgaatcttttgatgattcagaagtgttaatcttctcattgactaacgaagtatttcttctagccaaaggtgaaaaacttgtcttatctaaagcaacttttgatcttgataaatcttctttttcagttgattcactgtgattttttgaagtgtctgatgttgcttgatgaatcaatttctcaggttcagttgacttgctttcacttgatttatcaggtttgcttggcatttctggcttatttggttcacttggcttgtcaggtttacttgggttttccggtttatccggcttacttggttcactcggttcgtcaggtttgcttggcttgtcgggtttacttggagtttccggtttatccggcttacttggcttgtcaggtttacttggcgtttctggtttattcggcttacttggttcactcggtttgtcaggtttattcggggtttccggtttatctggcttacttggcttgtcaggtttgcttggcgtttccggtttatccggcttacttggctcgtcgggtttacttggcgtttctggtttatttggcttacttggttcactcggtttgtcaggtttattcggggtttccggtttatctggcttacttggttcactcggtttgtcaggtttattcggggtttccggtttctccggcttgtttggcttgtcgggtttagttggttctggcttcttagtagtaccactataaataacttggatctcttgatctttagtatttgcatctactgtttcttctggaataacagtatagttaacatgctcaaagcctaatgatgcaggatcttttgaaattactttttcgaaataattactgctagttgctttccatgcatgagtaccatcctgagtatcaattgcaccatcattattaatactatagccgaccacaccagtcactaaatctttcactggaaaacgaacaaaacttgcactttgtacatagctagctttgccatcaggtgatcccttaacaggatttcctttatcgtcaacataagtaatatttctagaaacactcttactttcttgtttttctttctttagaacatgtctaaatttgacataaaatacttgtttttgattaccaaacttaagattttgacccttagtatcatcgctaactaattcataatgttgattttctaaagccttaatatcacttaaagttgaatatctagcatcagctccacttaatccagttaaatctttacttaagatatttttgttattttcatctaagtcctggaaaataacaagaatagtttgatctaattgttgccctgaagaatcaccatttgcaatattttgtggctttaagttagttggctgatttacaacagatacattaagagtataagctgctggacctactaattcattattcggattattatcatctttcacatcaatccaagtagcaagattgttcttcatataattcattaattcgggattattgattctaattcccttatataaaattggataagcattattcaaattgttattaagtacttcatacttatcttgatcttgatatatctgagccttatcttcttctggtttagtaatatcgtcaggctttgaaacatcaacacctgctttagtaatttcagaaataaaagaaattggtaaagaatatatttgacctaaattagctccattaacagtaatgtgatatgtacgtgaagtcattaattgatctgaactgtatttcgacccatcggctttcaagactgtgctatatgctttttcaggattgtcactatgagtaacaacaattgaaatattattttctggtattttatttaaactaaaaccgacatttgaattatcttgagcaatttgatctaaattgttagtcccttttagttgagcaaatgcactttcaatttgttctttaatctcgttgtcgcttgcataattataatcaaagtaaggattattacttggactataaaccgttactgtagcagtattaccaaaattcttagcaaaatatacgattccatctaacccaagcggagatttatcgtttacagtaaatgatccgtcaggataaatagtccatactctagaatttatgccagtacttcttccttgaatccatgtgttttctccaatccgcggagtaatcgctccactactttcttgtggaatatatttaacaggaacgcttaacccagaagtaaatttataagcgccatccccaataactagatcattttgagcactataactggttgggccattcttttcatgagaatagccgacagtactaatagcacgctgaattaaagaatattgctttaaatcaagattaagaagtatggcaccatatttttgaatatgatcgttaaaacttaatcggtaaaattcattcggaatatttcctactgtggcaatatttcctattgtatccgtctttcctgcattatctttaacggttactggtgtatctttctctgctaaaccatcactatacgttttttgctggccagattgtagtggcaagcctaaatcaatatcaatataatcaccaggattaatgttcttagtattttctatttttaatcctaaatttagttgaacatagccactatcatgtggggtatttccgttatttgcaaccacatcatgctggataacactataattttctttggcaactggtttagcttgatcttgatcagcagttgaaacttgtttagtttgatctttatttgctgcaataacttttttagtattttctatctgtagctcggcacgttgattgctttctttattggtattagttgctttttgttcactgcttgtattaacctttgacttttcagcagatacttgattttgtgcatctacattcttagtagttacaaccacgtttttaatattacttgatggactagttgtaagtgccttgcttgattcctgttcaacagcaggattttgtttatttgaaccattttcattaacactatctgcttgagctgtttgagaatttagcccgaaaattgacatccctataagaacagaagctgctccgacagtaaacttacgaattgaataacgaggacttatttctttaagttcattaaaatgattattatttcttgataacattattatcttgcctctttttatgaaattaaaatatctattgattaatttaatcttttcttttttaaaccagccaaaccgatcaaacttaaatcaactgctaaaccagttgcaactatagccgccgttttttcattattattaccagtttgcggtaaagttgctttttcagtctttatcttattgatacgctttggtttctttacatcatctactttcttcatagtagttacttgtgaatgagacatgtatcttggctcattttctttttcagaaatcaaattattagttctattaggtttagaaatatgttgctccatattttctgtgattacttttgactcagcaatattagttgaaatatgttgcttgttagtagattgttccttattatctgacgaaatcggcgtcacaattggcttaacaggttttgtaggatttagctgtttatttttaatgtaagaaatattgataatttcattttgattattaaatttcggcgttagcttttctaccttgctttgacttggagtgtaacctttaatttcaggcacattgtattcggcaaaactatctgaacctacattcttccaatcattcataaatgaaatattatttgtaacagcatcttttatagccgtctgaacaaacttaactgcttgaacaatagaattagtagtcccatcaggtttagttacattaatcgttctagcaattaccttagtcaattttggatcattagccactttgctaagctgatgaactaaatgaataataactggtttattattatctgctccaaatgtatagcttgttggtaaaatagcgccttgcactaagtcataattttgaggaattgaaatatttaacttaatatcttcaccagtcttacctgcaatagtgtgtttttgattaattaccggatctcctacctgataatcatcgtcgataaattgataataactagtctgtccattagcaagatatctaatattgactgtcgaatccttagtttctggtgttaccaccatttctggagccgaaccattaattgcgtatcccttaactgcctgcacctgcattgcagcaaaagcatacttactattatcagaccatggtccataactaatatttccggtaaccatatccttcttaccaatacgagtaaaggtatgcttctgaatagttttatcaattttaccagcaatattggtaattaaaatggtacgactaactgtcttagttaagctagaatcattaacaagatcactaatatggtgagttaaatgaatcataattggtgcattatccgtagctttaaaagtatagctcatgttctgatctggaactaaatcataattagttggaactgaatcttttattgctttagttaagtcaaccatttcatcagtggttccagaaattggatgacttgtaccaaccttagctccctcttcattatcgtctacaaactgataaaaactgttttgcttatcagcagtgtaactaatattaatatcagcaggattattactatcagccgttacattaattgcatccaccttgccagatggtgtatatccagcaaatactgacaaagcaattgctagtaaagtttgttgattcttattccacttaccataaatgtgtttattagttactttatctaaggtatcgcttctactaaatgaaacactttgtgttgttgacttaggatcaactttaccatcgggatcagtaatagttactttacgtctaattgttctagtatcatccgataaaactttcttttgatgaattaaatgaatttttaactgttcattgtcgctaggcttaaaagtataactagttggtaatgtgcttccttttgctaattcataattagctgggagtttaatattaagttcaacagtttcgccagtcttacctgaaaatgacgtagcaggttctatcacctgttctttattatcatcatcaacaaattcataactactagtaaggctagcaggtgcatatacaaaagaaatattcaaatctgctggagaatccaatgttgcagtattttgggcaatttctttggcatatttaatgtcattttcattcgttgaatagtctgcgttcccaattttaacagctgaaactgtatatccggttatatcagtatttacacttgtttggccatctttagctttccaactatatgtaggtttattactattatttatcacagcaattgggctgccagtaacaatacttgcatcattatattctgcaggatatattgtgaagtaatctttgccagtaccatttggattagctgccaccaaggagccattaagatttacatcctgagtacttgtttcttgtaattgagtatgacttgcatcattttttacaaaattaatagttctcttaattgttgctgtattttccttaggaaaataccagattatatgttcatttttattttcataaataccatcttgatttgtataagcaatactactatcacttgtatcagacgtgccaggacgaacagagttattgaacctaggatttacaaataaattagctggtctacctaacaatggatagccgtttacaatattatctataaatggatttgcatagtaaccatctacagcaggagttgaaaattcgactgtcgaccaatttccatcatttggaactaatatgtagcttgtcccttctttattaattggaactttccagcatttcacattactaattgactgaactccctctatatatccgacatttacttattgagaatttgcaccatcatatgttttaggagctttttcatcccataaccaaatattactcttcttaacaactttacccttagaatttacaaactcatcctgtcgataattaaaagttgctttaaggtctggagctacagatacataatttccattactatctttaacaggatcgccattactgtctctttcatacaaatgaacagtaactgtccgttgctctgtaatcactttcttagttaaatttatttctacattaactggctctgcaattccgtcaaagccaaagtgtttttgcccagtaatactcatatctgactttgtataatcatcgttacctagccagtcagcaagattagtaacaggcaatggattcagaccagtattataaggagtcacaatagttattccattaccgacgacagtaacagttccgagatttttattattatccgtctcaacatacgttaattgcattggaatttcatcatcacggaatacgtgataagtagtgtcactagtttcagttttagctatatcataagttgcatttgctatagcagttgcgctatcactcggcttggtagaaagatatactgcattggtaggaatagttactttttgataatttgcataattgttatgtaaaaatgtatcaattacgccctgaacgatagctttagcatcggaactaccttttgaatcataaaatatgctgtgactatagtttttgacagttggattagcataatatccccaactattatattgcctaaaagttgcagtgtctttaaatggagtcttcgaagcggtatctaattgtaaaagatcaccattatttgtaattacaacctggccgtttgcaaaactggtttccaaattaaaatcagaaggcaactttacattattaagattaataactgtcttgctatcattagtaaagctggcaaacacttgtccagtcgtccaccctcccgttgctttacttaaatcccagccagaaatatcaatatcttttaaattagtatcgtttctaaaaagacacaatatattttggacattgcttacattccacttgttaatgccatctaatgactctagagctggactatcataagtattctcgtcaaacatctgttgcatattggtaacatgagaaacatcccagccacttaaattacctaatgacttaaccttatatgctccgcaaaacatgccactcatatcagtcaaattgctggtatctaaattggtaagatccatctgtttcaaattaggatcatttgtgctaactccattttcagtagttaaatttccaccaaaagcagttttatctgaaacttgaactttcttattatctgttttactgatagctacagtagttggtttaattgtatttagaatctttttaaacttagctgcatttactgtaataactgcattctcatcagttaactttccggctttagtaaaatcagcagcgtttggaataactagatgttcttgatcactgccatggtagccagtaatatttaacccattattaacagtttctgtatcccaactattaacgtcaactttgccaaaagttgattcatcaagactattattagaattagtagtgactgcttttgaactattttttgcaatattaaaaggttgagtattagctgcttctctagtttttatctcagaaaaagtgctgttctcaaccttttgaatagtattttttgtacagttagcctattaatgattttttgattattttgtctaattaggtcagccttattttgtaaattggcagtattattctcactattttgatgattgttttttgcaataactacagcttgagtatttggtgtaattggctgtgatattttcttttcactagtttgttcattaacagtattgttatttacattattgtccttaacggtatcagctttagctacgccttgagaagatgcaacaaagtatgttcccaataatacacttgctgctccgacagtcaattttctaatactccaacgatctttccttttcatatccctaaaattcataacttttcctccaaaaataaaagccatctcatttaaatttagcatcaattgtaaagaaattaggcacatataatatattcacaatttcatcatagcacaaataaaaaagtatgctatatgttatttatttgatcaggcatccagatcctaatcttgcaatgtggaaagcgccattagcacatgttaacaagccattgttataaaccataatctgttttctacccgtaataaagttataataaactaggtaatttagattataatcattacccttttgagaaacattcaataatttaatttggatattcacatcattaggttcccaacttaaagttacatcacgtaattgacgaaaatcagaattgttttcaccagaaataaacttatttgcttgcggcttagtaaatactcccgttaaaaagtttttaatttcttcttgattgcttattacaggctggacttgcgtaggggtatacaattttgtattaggatcttgtttcgtaactgatttactttgtttattctgtggctcagaagaagcttcatttgtggcactttttttaacatgattatgactgctattaagattactttcactagagatgctatgctgagtagaattaaaattgctaccaacataaaaaccaatatagccaaaagtcaaaaatgctaagcaaactaataaccatagccatcctttcttctttttaactactttattttttttagcatgttttaattcttttgcttttgttaccgctactttttgggtggtatttttttcaacccttttattttctggtttagctttctttttcttctttggcacattatttagccttatgcccatcatccccaaatcggctggaattttggcattaatattatttacaaaatcatagccacaaaatggacatttagcttccccaagatttacttctttaccacaatttggacactttttattcattcttaaattcagctttcttttaatttttgttcttgttatccttattcaaaattgaaatcaaatcgatcaatgatttaagaacattcattaaattcgcaacaactggatttgataaattattaccgttttgactaacaagctcattaacactgcttttcaattgttgcaattgcatattttgctcagaatttttacttactccaaccgtaaagacttgtgttgttaaatcatttccatcaaatttttgaattttattatttccgtcaaaattattaaaaataacatggtaacctgctttttcaagccctgctaaaggaatcgacgtgctatataaatctgtgatattttcattaggtttgccaattaaggggcctgaggaagttatctgctgtccttcattatctaagtcaataaagttcacaattgcaatttgatcgttgttacttgaaggaacgtaagtattagactgatctttttcaaaattattcgcaattttttggtagataactttaatatctttatttgaattagatagggtaattattttgtaattacttctgtagcctggaatttgaggaattatctgtttagtgtttagtttagttggatcattaggatctgtttctaaatataaagttcattttgtaggtatcaactctccattttcatcaactggaattattttattgttacgaatataagataccttgatctccgatttgctattatttatattttcagtttctatgtgagaaagattactatgatatcctttaacgacgggaacttgaatcttgttaggaaagtctttctgaatagtcttccattcagttggataggtattgttttctactattttattcaagactaatgaaaataatacttttcgctgcaaatgcttggttttaataatattctctggtgtctttttgccagcaccatcgaacttaatcgtaaaagttatatctttctggtattcttcagggtttaccttttgataaggatgtgccgagtctacaattatttcatcacgtctaagtgtcacaataaagactggaacatagctatcattattgccgaagaattgaattcctttaccattaaaaccattgtcaactaacttgaatcccctagctattaagtcatttaaatcatcattaatatcgtaattaataggaaaatttggttctccttctaatttagtagttttaacgatagcattatttgccgttaaatttacatattgaataatagctgcttgtttatttgttgagggatgctcatttagcttatattttacaaaatattcttgatttccatcatcgggtactattttcttaccacccactgtagttttatcaggaacataacccggtaaagttggaactccaatttttagaaaagtattggtatctgaaatccaggctgttttcgatactatttcttttgtcactgcatcgacttctaaagttcgataaaattcaaccgaattaatattatcaatcggtgtcctgcttcctgctccagaatagtggactatttgttttattgtcctttttacttggttaagcgggaaattcttagtgatatggttaacatcaataatcttcttttggtgtgacacactaatattgacactattatcttttttgccaaaagttaatgccatctttctgtcaaaactagctgggatttgataaccatgattttgaagctcatcaataattgaaattaaatcaatattgatttttttgccctttttaccaaaaaaagttttgctagtaatgatttgatttttagtatctgaatctacaaaattgataattatttttcttttctttgaaaatatattaagcaaatcaatcacattttcctaaaataactatttctgaaactgtcaaattttttgtgtaaatagatttttctcgtagattgattttttaatcttttatttaatcaaagtaggattctaaggtatcctgaacctgaccaaagcctttgtggattcgattgaaatagcgttcgttgtagctcattgcctgaattgcctgtattccagccagctctggcataaggatcatagcctaaaaacgcagtcagttcagcctctaataggtcattaactgcttgctggagttctttgcgcaataaatcgtttattttgtcttgattgaatagagcttgtgctatatttttggtaaaatcattcatgaaggagttcttctttctgtatgtgtttttttgttcaaaccaatcatacgagaaaggaactcctttttctaatgttttaagaaataaatttaaggaattattcatccttacacaaactattttacagtctcctatttcttttcactcctattgtaactttttttcatgaatatattgaataatcttcatatattatgttattaatttgtttgtattgttgtgaaagaaaaataaaaagtgactccttccactaattgaacaaattcaagataagtgggaagaaatcgattaatagaataggaatataaaaatgagaagaaataaacaccaacacaattttaacgatttttcagatcaagaaaaagaaaagttaaaaacagttcgacaagaattaacacaggcacaaaagaaagaacccgaaagactctgggaacatttacaagcctttaatgatggtgtaatggctattattatcacaattattgttttagaaattcagccagcaattcacgaagttcattatgaacaatttattgctaatattatcgtctttttgattactttctttgtagtcgctgacttttggtatgatcttcacttggctttttcttactatatttttaaaccaacaaaaacgattgcgatactagatttctttttcctagctgacctttctcttctacctgtgatgactaagtggatcatggctgaaagctcaacctttgcagttgccaacttcgggattgtttttttaattgccaaaattttggaatatttaattcaatactttggtgcgaaaaagacagcaaaatattcacaaattatgaatattattatcagtagatcattcattagaaaggttactgttaccctgttcttaaatgttattttgattgttctgtcattatttattccgaaaatagctatgattttatacttagttattccggttacttcatttctatttcctgttaaacgcaataagatagtttgattaaattacaattctttatgccaaatgtttatttataactagcttgtataatattttaatttcttaaacaaaatgcaaaaaaaagagcaatgagtttttcaaaatagaagatcattgttcttttttatattttttcaaaaaaatcttatttaattattcgttaatttattatttttttaccgattaatgcatctttttaaccgataacaagcaaaataaagtctttttatttctaatctctataataaaaattgaaaggagttaaaaatgaaattcaaattattcattgaaccaagtaaagcagaaatagtggaagcttatgtacatcaaaaaagtgatttttcaactcaactaaaagagtttgttttatcaaacggcgattcaaatacaattgtagcttacgatgataaagatttaactatggtcagcttttcagatattgtcatgattacaattgttgaaaataaggttctagccatctgtactaatgacaagcaatatcatattagaaagcgactgtatcaactgactgatcttcttccatccaacttttggaaaatcaataaatcagcgatagccaatcggcactatattgaccactttgaagaaaccaaaaactctggagtcaatattattatgaaaaatggactaactgattatgtttcaagacgttgctttgccaaaattagaaaggaactgaattaaaatgaaagactttatcaaaaactttgttaaaagtggactacaggcggctggctttggtcctctgattcttgtaatcttttactctatttattcttttactattaaatttcagactatttcagttcaagatgtaaataaaaatattatctccagtcttttacttgcttttatcgctggtggcattaacgcaatctttaaagttgaaagaattccactcggtcttgcaacaacaattgatgctattgtcatctaccttgattatcttcttttctatatccttaatgattggatcaagttacaaatgataccattccttgtttttacagttctttacattatcggctacttaattatttggctatgtatttaccatcaagtaaaaaatcaagttcaaaaattaaatcaaaaattgtaataaaaaatgcgtattatcttcgctaaaaaacattgataatacgcactttttatctatccttctgctttttttatttgctcatgcatattcgctatatctaagtctttttccaccgtgttttcctttcaaaattaatgaatctggtcctctaaaagcgtcttacctaagatttgattgaaactataatcaactggcacatcaacaattgtcggtccactttctttaaaaatatggtctaaaacctttccctataaaactttttcatacatcatggcttgagtgtcgccatcatcttcataatgaattgtggcttcttccgcaaattcaaaaccacgtttttgatataacttttcagcaggaagattgcctttcattacgtccaagtgaattgcataataccctgcatctttagcaaaattatcaaattcagtcagcatcttgccagcaattccttgaccacgttctttttgactaacagcaaacaagtgaagcacagttatcttcctatcatccaatttatgcttccatgcaacatgcgcatagttaggatcttcaccatcagtcaaaacaccagcaccaactaatttaccatctttaatagcgataattatttgtgcattttttaagaaattcgccaatatttctttacttgggtaaatgccccaatgccaatctggactatactgatcagtcttctggtcttcacaaacttgctggtaaaaatcacataagtctgttaaatcggctaagcttgcttttctgattttcattagattaattttcccttctgtgtcaaatttaacatctattctaataactcaaccttttaattgcattctttcattaaagtaatttcggtaagctaaatatccagcaatcactgctcccaaacttgttgctcctaaaagcataaatgtaatcataatttgatatttaatagcataaatgggattaactccagcaaaaatcaatcctgacatcatccctggtaagttaaccaagccaaccgtcttagctgaatcgatcgttggctgcatcgcagtttttatgcttcttcttagaattggcattgaagcagttttaatatcactgcccaaggctattttctctaatagcggctgccgtaaatcacgaaagctttcatttaaagatttatagcacaaaccaacagctaccatttcgttacctgcaatcattcctgtaattggaataacttgcattggaatcgacttaatcacgcctgaaagaattaagatcgctaaagtggcgtatgtaccagcagcttccgcaatcagagaattataaaactttttatcgggattagggtctctttgattagcattccacgacgcattaaaaataataattaaggttgatgcaaaggttagccaataattatttacatggaaaataaactttaaaacatagccgataactattaactgaacgattgctcgaactacgctgattagaatgtctttagttaaaccaagtttttctttagcagaaattgcaatcgaaactaaaaccaatgcaaaagcaaagacaagcgaccaattacttaccatgacatttttcattcgaggatgccaccttttttaattcgaataatattttgagctgtagttatttcatcctgatcatgcgtgacttgaataattgttacaccttgttgatgaactcgctcaatcaattgatgcacaattgccttattgtcttcatccaaacctgtggtcacttcatctaaaagcaaaactttcggtaaaaaaatcaaatttctaatcaaagcaattcgttgcttctcgccgcctgataggctagtaatgtccttatctaagtaatctgcttctaagcttacctcatgtaataactgcaataaacgttctcgatcaactgcttgctttctaatttcatatggaaaagataaattatccgctaccttttctccaaataaagatggctgctggaagcagtaagaaacacttctgcgatacattaagggatcgattttcataatatctttttctctaaaaaaaatctttccactagttggattaattaagttagcaattagcttgagaattgtacttttgcccgcgcctgaaggtccgatgagcgtcaaaaaagcaccttcttcaacttcaaaagatacattttgtagaatctgcttctgccctgcttgataagctacatttcgtagttttaaaatagccatctattttctccatcataaaattaacctaacgttttcatcgtataattaactatagtcttttttaagcgaggaataaatatggtcagtaataaattcagcaaactttgagttctagaaaagtaaatatgtctgctcagtattgcgatgtcggttgcaattttcttacttaaagattttatttgaaaactatttaacatatcaaaataagcactgataatcattctaattaaagcttgattaatcagtgctttttccattaattttttccttatgaagagaagtactcttacttcagaaactcttctaactcctcatcagaaaactcatcgctataatcttgctttagttcttgcaagatctgctcattactttgattcattctttttagcatcttgactgttttgctgatagccgaagctgttgcttctcgttttccttcttctacaccttgtgcgagtgccatctctttaatctgttccgtattcatcacgtgttcactccattcttcggttttacgataattatccatcgtctttttgattcgcttgataaatttactatttgtagtacttttaccttccatcaatgaataaaagtcatcaagtccttggctcacgtcacccttttttcctttgctgtttaagtatattatctcagattcgtcattcagttcaacagatttatcttctctagcagagtaagtgaaactgtatcttttcaaccccttgcctttaggatcaaaaggcaaaataaatattacatagacagctgtcaattcgccatacccgtcgccttgatgcaaaaatccagcttccatcattttatacatgtagtagcgtgctcgtttatccaagtctttttgcggtgcgacctgcatctatatatcgtaccttctaccctgactgtcttttatcaacacatccagtacagaaaatttctcttccttattaaatgcaattctctcttgcgtccgcacagtaagaccttgaatattcaaatctggtaaaacttcatgcaaaaacattcgacaattcaaaggatctttcatcacattctgaaacatcagatcgtctgtgatacctaatagtttcgccacatctggctttttcttttctttcacgaaaaaggtcttcctaataaatagtttaaggaatcaatcctcactatttattacgcaaacgtgacggttattttttagaaaataatagatttttagtaaacataaaaaaaacagtactcagttttagagttctccggcttttgtgcttattaattaaatcaaaactaactttacttgcctatgcgccctattagcaatttcatttaataatcctatagaaacattcatatttccagcttcaattcttccaattgtagattggggcttccctacatatttagcaaattctacttgtgtcattcctagatctttacgcatatctttaactaagacagcagcgtcgagatttaagcttgcttgttcatattttttctttagctttggattcttttcaatatcttttttaataaaattttggatcttactcatattatctcaccccatatttttcttcatatctttttatatactttttatcttctaatagtttgcacatctcgttttagttataacatgttatactaaagaaacaataagaaaggacgatcaaatatgaaaaaactaaaagtcagaaaaattggaaattcccttggcagtatttttccaaaagactggggagttcatgatggagagctactttcctatacaattgataaaaaaaatcatcgagtaattatcgacttgagcaaaaatgatttagaacatgatcgtgcattaatagaagaaggttttaaagattttgaaactggaaactttgctacagagaaagaaatgaaagccatgtttggcaaatatggttggggaaaataaatgtataccatcatttattctgaccattttactacatccctaactaaagaaatttcttactggaagaattctcttcttctttccgataaagaaataacaaaatatatttctttaatttaccataatataaaattactatctgattttccttatctttatcaggatgtacatcaaaaatatcagttggataagccaacttacaaaataaccatcggcaaaaaatatgcaattttttatcgagtaagagaaaagaaccacacaataatcattggttcattttttagcaacaaacaaatgcgactagaattctaacatgactctatactcaaaaagaggatgattttacactagtgctgtaaatcatcctctttttaaatgtagttaatttgatataactatccgttgatctgctacttgctcaataaagtactcatcatgctcaactaagagcatcgctggctttaccttttgcagcagtctaatcaactgatcttggttaaacacatctaagtaatttgctggctcatcccacaagtataagtcagctttttcaactaatgacttagctaacgcaacccgcttttgcttaactttcccattgaagaccgcgatattacttcaacttacttaggtacagaatcaatgtctgttaacttaccagctgaatgtaacttgaataaaaataaagaactatcattcaagatgctcaaaggcaaaacaatcttaagtccttcgccaattggcttttggaccaaaatctatcatgacgagattctagatagcaaaatcatttttcaaaatgaatcaagtgaatatagcgagattctacaatactctgttttacctttctttacgacaaacttaacgagtttagattctcaatggggacataatttacctgataatcgcagagttcgtccactaaaaaatgaagtagcacatcagaaattttacgcttgttacctaaaacaaaacaaagaccgagtccagcctttaattgaaaaattgcaagaccaatggagtaaatatgaccaaaaataaagacgattgcacaattaataatgtgcaatcgtctttttactatatttaaaagaataatttactcatgataatcatgaagatcattaaacaagttgaactaattgccgcagcgccaaagactgtaccaccgcgcttgaaaatcacgttaaagttaacagaaattccaagagcagccattgccattcctaagaatacgtatgctgcttgaactaaaccgtccaaaactactggtggaaatggtaagaaagttcctaaaatactagtcaagatgaagccacctaagaaccatggaattggtaattttttaggtgcttgcgtatgatcttgcgtactctctttaaccagtcttcgttgataccagtaaccaacaatcaaagcaacaggagctaaaagcagaacgcgggaaagtttcataatcaaggcactatctaaactagcttcgccaaaggcattccctgctgcaactgcatgtgcaatttcatgtaaagaacctccagctacaattccaaattgtgaatcagtcaatcccagcattggcttaatcacaatttcaaataatgtaaagactgttcccattacgcaaacaacggcaactgcaagaacttcattttctctcttgcgctcttcatcccggctctcaatttgaggagaaacacccattacagcagctgctccgcaaataccagtaccgcaagcagataaaactgctaattcatcttcggcaccgaattttttacttaaccagtaagtcaggatgattgtgccactaacgcccaacatcgctactaaaatagttttaataccggcatcagctaacttggttaaattaagcctaaagccgagtaagataattccgagtctcaaaaacttattagaaataaatccaatcccaggggctgcttcttctctaacccctactggtaaaacctgcaaagatattcccagtaacagtgcaattactaaagcaccaattaagttaagatatggcaatttagcaataaaaattccagcaacagaacaaattaatgtcattactgctgctaaaccaaatgatctacttttaacaatacttatcaataaaaaatacctccagtttaattgcctattccaacccaggaaaatttacggaatctgcaattttatagtgttataaattgattctctctagaaagcaaaatttcttatagataatatcttatcggatttaaaattaaaagtaaagcaatatgctcaagaaatcacaaatattttcattgatataaaaaggatgaaagcttagatcatgctttcatccttcaattttgtgagattattcataaagtcttttagatcaatcaccgtttcaaaagtaataaaaaatagtaacgccttaatacatgatcgactaagcaagaaaaagaagatgactattattactataaagctaagagccataaacagagctaaaaaagtcatccctgcgccaaacaaattcacaatttccttaagactggtcggctcatttttaactaataatgacagagcgcgatattgcttactgcttctgatcttaaaagaaagaattgtaaaaattgttgcaacaataatcattaaagaacctagcaattgaactaccaagctcatagctggctgtctaaagattaaaattgctccaacaataagcaaaacatcggcaatcagattatagagcaatcgcttgtgctctaattttacaaaaattaagttatttgaatccattattcgtatcctttaaaaagtttctattattatcagtatactggctaaactaaaaatgaccaagagcgattttaactcttggtcacttaatttcaattatcgtcctttgtggaccgtgtcattttcaactggaatagctttacttttaaggtcgattacaacatataaaaaactaattaaaccagctattacaaataattgggacatactacttggagtcttccccccactacttatcttacaggttgtcaatgacttttcaaaacaaaaagacttgcgtcgctggtgttaatgaaatccagatccagtaaaaagttatcgtcactacagctaaataggacattaatgtcaaaaatttttcaaaacagccaccaactttataatgaaatggggattttttctttttcttataaaacggcgctaaccactctactccctgcttactgaagctatcttgaattaaatgcaaaaaatagccaactactagtccaaaccaaagtgcactccagtaattctgcaaagttaaattattgattcgaatggggatgaacttattcattaagtaatataagccaccagaaaaaaaggcccagccaagaaaagaatgagtaatccctcgatgtctaagaaaaaggctgaagttgattactgacttcttacttgctgaactgttgtattcgtcaatgtcaggtaaagaagcgccgattgcagttgcagctagaataattatgttgttaactagatcaattagcaaacgattagttaacaataaacttagctcaacgattgcaatactacaaattcgatgtgattttgttagcacttcttttcaccctctctatagaacatacattctattgtaccaaacttcgcaatagaatgggaacttgtatatcgcaaggtgtgagaaaacgtccagctttttacactggacgtttttttaaagattaactttaaactactttacataattattttactttaattaatattctctcgcagtatcttactaaattctgctacttgtgaatcatccggtttagcaagcaaaacgtatttttcacgcaattgtttacctttcctgagcaaaaacaacttttgcacctggtcatcatctacatgacttgctgtcctttcattcattattaagtaacctgacccagattcaaccatcaaaatggcttcacctaaagtttcaactgcaagcagatcgttctctattttcaaaatatcctttaaataatgatattcacttttctcttcagctacagaagcaaccatgatacatggcacgtttttcaaatcatctaattcaattgtttgctgatacttattaaaattacctgcctgaactaaagcaagtaaggcaatatcacttactgcataacttgcaagtgtctgataaatggtatttctagaattaactaagaccgcatctacttcaccatcttgaaccatagtttcgatttcatcaaaaccaactggctctaactcgactttttcattttcatgtaaagcctgccacttagctgccgcttgctctaattcatgtctacccaaattcttcagatatccgattttcattttttcacctatataaaaataagactttgatttctcaaccaaagtcttaaaactttaattacttagccttatcgtgaaaagcaattgtaaatccattctcccaaacctcatttggagcaatgtgattcattccacgcttgtgctctaactgaccatcactatctaaagtgtccgcaataccccaccatggttcaatacaaatgtaattaccagacttaggatattgtgaccataaaccaacaaatggtgcattttccattttaacgttgatatgataatcactcttatcagttctaatagaaatcttattaggctgctttaattcaaagacccaagcatcatctttaaataactcatcgctaatttcaaacaacgagtctgttgcaagcaatgaacgattatcccagtcaaggtaaggtgccttcaatggaattttcacgtgatccatggacggatcaaatttgaagtaataatcattcttagtcaagccattatcggttggtaaattaaagccagggtgaccaccaataccaaagatcatttccttagtatctgtattagttacagtaaagtgttctgacaacaagttattgactaagctgtaagttactcgtaactcaaaatcaaatggatacatttttttagtatcttcattagaagttagaagaaaaacaatgtgcttatcgtcttgttcttcaacagtaaactgcgaatctcttgcaaaaccatgttgtcccatatgataagtcttaccatcataagtatattgatcgtcctttaagcgaccaactacagggaacaaaactggcgcatgacgaccccaaattttaggatcagcttgccaaatatattctcgaccactgtttacatctttaacgctttggatttcagcaccctgatcagaaagcgttactgttaaaaaattattttttaattgataatccataatttaacttctctttatctactaaaattacaaaataaattttgttaagtccttattgataattatatcactcaatttttggtcaacatacttctgagtaatagtaatttcgcccatgttcatatctggtccctcataaagcacatcttcaagtagcttttctaagatagttgctaaacgacgagcaccgatgttgtcagtaccttgatttacttcaaaggcaatttgagcaatacgatcaattgcttcttgagtaaagactagcttaatgccatcagccttaagaagtgcaatatattgtttcaaaagtgaattttgaggatccttcaagatcttgacgaaatcttcttgagttaaggcgtttaattcaacccgaattggaaaacgaccttgcaattctggaatcaaatcacttggcttactttcagcaaaggcaccagccgcaataaatagaatatgatcagttgatacagggccgtacttagttgaaacggttgatccttcaacaattggcaagatatctctttgaacaccttcacgagaaacttcaccagaagttttcttgttaccagcagtaatcttgtcaatttcatcgataaagataattccattttgctgagtacgctctattgctcgttggtagagagaatcgtaattaattaacttcttatattcttcttgaattaaaacttcacgtgcatctgacaccttcaaagtacgcttaacagtcttcttaggcattaagtcacccatcaagctcgacatatcaattcccatttggcccatcatgtcgcccattgggttaaccttaggtgcttgttcaacttcaattgttacttcacgattttcaagtaagcccttattaagttgatcagctacgctaagacgttcattgcgaatatcgtcagttacctcttcattatcttgagcttgattcatgttgaaattgccagaaagcatctgcatcatttgctgcattgaattttcgcggttttcacgcttaatacctggaacaattaacttaactaagcggttatttgctttcttagttgcttgcaacttaacaagatcaaattgttctttttcttccatgcgaactgcttcttcaactaagtcacgaaccattgactcaacgtcacgtccaacataacctacttcagtaaacttagttgcttctacttttacaaaaggtgcgtcaacaattttagccaagcgacgtgcaatttcagtcttaccaacgccagtaggaccagccattaacatgttcttgggagtaatgtcttgttgcatttgcttaggtagttgcaaacgacggtaacggttatataaggctaccgcaacagactttttagcttcattttggccaataatatatttatcaagtaattctacaatttgttttggagttttttcttcagtcaaaatatttcacctagatttcatcagtagtaatgtggtcatcagtaaagacatcaattccagaagcaatcttaactgcttctttggcaatttcacttgcgctcatcccactactgtggcgagtcatcgcaattgctgctgcttgtgcaaagttaccgcctgaaccaatagctaccacatcttcatctggttcaagaacttcaccattaccagaaatcaataataaatccttgtcattaaaggcaattaccatcgcttgcaatttagctaaagttggatcctttctccagctttgtgccatttcaacagcagctctacgtaaatcacctgaataagtttcaagctttccttcaagcatatcttgtaagctaactgcatctgccacaccaccggcaaaaccaattactacttgatcgtggtaaattcttctgatctttttggcagttgccttagcaattaccttttcacctaaggtaacttgaccatcgcctgcgatggctgtttgattgttatatctaacagaacaaattgtcgtcatattattatgcctcgtctttcttatcttttcttgggaaaaatttttgataatcagcttgtaaatgcttcatcgtaacgtgcgtataaatctgcgtcgtagataaagattcatgccctaataattcctgaacacttctcaggtctgccccattattgagcatttcagttgcaaaagagtgtctaagcatatggggatgaacctttcctccaactccagccttaatgaaaacttgctgcataatatattcaatcccgcgaccagttaatttttgaccgcgattattcaaaaatacatagcccaaatcttcattttgaccaagtagagctggccgaacatcatcacgatattctcttaaagcatcaaatgcatcttttccaaaaggaacgtagcgatctttattacccttcccatgaactaagataatctttaaaccaaaatcaatctgatctagcttcaaagatgccatctcacttaaccgcatccccgtcgcataaaaaagctcaaacatggcgcgatttctcactaccaacttatcatgaccgacaagactatcaaagacttgtcgcatctctttttcatagaaaaactgtggtagcttcttttcgcctaatcttaagctaattgtctgcatgggatcattttctaacacttctcgcttaacaagaaagcgataaaaagatctcaagctcgacatcttacgtgcctgggttgttctagacctattttgtgcagctaaactttgtaagaaaatctcgacatcgcgacttttaactttatcccagccgccaaagccaccattttctttaaaaaattgttttgcttcatctagatcatttaagtaagagcttacagtatttttactataattacgttcatagttcaagtaatcttgaaattgttcgattaacttatcattttctttagacattattaatcaagcttcttttcttccttaaaggtttcaagatctttcaatgctcgtttagaaatttccaagtgtctttcctgtttatttctaaccttataatctaattttggtaataatgcataagatgcgttcattggctggaagtgtttagcactagtagttgtgatgtaatgagccattgagcctaaggctgttgacttagggaaaactaatgtttcttcgcctaaggcttctctagctgcattaattccggcaattagtccagaacctgcactttctacatagccctctactccagtcatttgtcccgcaaaaaacaaaccagcttgttttctagcctcataatttgcatttaaaacttctggactagcaatgtaagtattgcgatgcattttaccataacggacaaattttgcattctcaagacccggaatcattgaaaagactctcttttgctcgccatatttcaggtgggtttggaaaccaacaatgttgtacatcgtacttgctgcattatcttggcgcaactgcacaactgcgtaaggagttttcccggtcttaggatcttctaagccaacaggcttaagtggtccaaagagcatcgttttttctcctcttttagccataacttcaattggcatgcagccttcaaagacatttttatcttcaaagccgtgcaaagtagctgtttctgcactgactaagtttttatagaaattaaagaattcttccttagtcattgggcagttcaaataagctgcttcacccttgtcatagcgcgatttcttataaacaatgtcgcgatcaattgagcttgcagctacaattggcgcagcagcatcaaagaaatgaagtgaatcagtaccacagaaatccttaatctgttctgctaatgtatctgaagtaagtggaccagttgcaataatagtaatttcatcttttggtatcttagtaatctcttcttcatgaacatgtacgtttggcaagtctttgagagtttgcgttaccactgaactaaacttatcccgatcaactgctagagctcccccagcaggtacagctgtcttatcagcagctttcatgattaaagaatcaagctgacgcatttcctcttttaacaaaccaacagcgtttgagagctgattagatctcattgaattagtacatactaattcggcaaaattcgcagtttcatgagcaggtgtagttttctttggtcgcatttcatataactctacttcaatgccacgcttagctaattgccatgcagcttcacttcctgcaaggccaccgccaattacggttacattctttaccatgcaatctttcctttctgctcgactctttcaagtctatataaaaatgatatcattaaaccgctttcgttttaatgatatcattgatttttatactaatttaattttcttctggttcttcacgataatcgccgtttggacaaagaataactaagcccttcttattcttcttttgaactaagaaatgaccatcatttggacaattacgaccaattggttgatcccaagatacaaagtcacaatctggataacgagagcagccatagaacttacgattacgtttagacttcttttcaataacttctcccttaccacacttaggacaagttacgccaacttttttaataattggcttagtgttacggcaatctggaaagcgcgaacaagcataaaacttaccataacgtcccatcttaattaccatcggtgcaccacaaatgtcacagttaaaaccagctggttcatccttaatttgaactttttcaatttgttgatcagccttgtctaattctttagaaaatggcttgtagtattcatctactactttgatccagttcttctttcctacttcaacgccgtcaagatcatcttctagttgagcggtgaaatcgacgttaacaatatctgggaagaattcttcgattaacttatcgacaatttcacctaattcagtcggtacaattgatcttccttcaagttttacgtaataacgtttttgaatcgtatcaattgttggtgcataagttgatggacgaccaacgccattttcttcaagagctctaactaaactggcttcagtatatcttgctggtggctgagtaaagtgctgacgatcatcggtctttttaagcttaaccttatcgccttcatttaactcaggtaattcattattcttttctttttggttatcataaaccttagtaaaaccagcaaacttaagttttgaaccagttgttctaaaggtaacgtcattttgttcaatatcagctcttactgtatcgtaaacagctggcgtcatttgactagcaataaatcttgaccaaattaaggtgtagagacgatattcttcagtagtcaaatattctttaactgaagctggcgttctgaaagctgaagttggacgaattgcttcgtgggcatcttgagcatcagcatcgtttttaaaatgttgcggcttgattgctgcataattcgcaccatattcttcatggatgaattttgaagcttcatgcttagcaacattagcaatacgtttagaatcagtacgcatataagtaattaaaccaactgatcctttacccaggttaaccccttcataaagagattgagcaattctcattgttcgacgagtacgatatcctaaacgcttgttagcttcttgctgcatagttgaggtagtaaaaggcgcagcaggctgacgtcttctttcttttttaactactttggtaacttcaaagttcttacgtttatcaatttgttttaaaatatcttgaactgcttcattatttggtaaatcttgtttcttacccttaataccataaaaggcacccttgaatttttccttgcccttttcaaaatcagcatcaattgtccagtattcttctggcttaaagttcttaatttcgttttcacggtcaattactaacttcaaggcaattgattgaacacgtccagcggataagcctttcttaactttttgccacaagataggactaattgaataacccaccaaacggtccagaacacggcgtgcttgttgagcatctacaatatccatatcaatggttcttggattcttaaaggcatttttaaccgcatcattagtaatttcgttaaaagcaacacggttgtgctctttaggatctaaattcaaagcatgagcaacgtgccaggcaatagcttctccttcacgatcggggtcggaagcgagataaacatactttgcctttttggcttcgctctttaattctttaatcgtatcgccttttccgcgaatagaaatatactttggttcataatcgtgttcgacgtcaacacccatttgggacttgggtaaatcgcgaatatgaccttttgaagcgataacatgataatttctacctaaatatttttcaattgtcttagccttatgtggagactcgacaataactaaattctttttattttttcgtttagtaggcatagaatgccccttccttgcacaatttctaccaaattctaaaataccaaaaatttcactcttgtcaactaaagcaagtttctaaaatcggcattgactagtggatatgcaccagcagcaattagctcgttaagcccttcagacaagggacttgagactggtccaggaactgcaaaaatatttcgattttcttctaaagcaatatttgcagttattaaagaaccagatctttttctagcttcagtgacaataatatttttacttaaacccgccaggatacgatttcgttcaggaaaacgataaggacgcggcggtgtatctggcaaatattcactaattaataagcctttagccacaatttcttcttgcagctccttattttcttgcggataaaaatgattcaacccgttcccaaccacagcaattgttttaccgtgattctttaaggtttcttgatgggcaattccatcaactccacgagctagaccgctagcaattacaaaatcttgttctattagctgcggaattaactgctttaatacaaaccggctgtaatttgtcggctgtcttgcgccaactatagtcgtaatttcttttttaagcaaggataaattttctctagtaaaaagaatcgttggtgcattatacatctcacggagttcgtctggataaatcgaatcaaagatagtaactacatcacactgtaattcaattctctcaatccaagaattaaacttatcatttttcatcgcagctaaaacaagattttggatatttgattttaatgataaactttctattttgtcaactgttacttcttcaccagctgtaaaattttcagctattttacccaaagttgcagtaccgacgccatgttgcaattttaatcttaagcaaaattcttttaaattcataaaataaaacctccactatcaagtacgcaaaagtgaaggtttattttttatttatttttcgtattcgctaactggtgcaaaagatcgccggtgaattggtgttggaccgtactttttcaaagcttccatgtgctcacgcgttccatatcctgcattatgcttaaagtcgtattctgggtaaacctcgccataagcatccattaaattgtcccgaaaaactttggctacaatactagcagctgcaattgaattagacttagcatccccgtgaattaatttaacttgcggaatatttaaaggcacattcattgcatcaactaataaagcatctggctttacctttaagccttgaactgcatgcgccattgccaggcggtcagcttcataaatattaatccgatcaatgacatcattattagctaaaccgacgctaacgctgactgctttggctaaaattttaggaaacagttcctttctctttttaggagacagtttctttgaatcgttaacatcaatcaaatcaaaattatgcggcaaaataacagcagctgtaactacaggaccagcaagtggtcctcttcctacttcatctactccagcaacgagctgacttttttgccaaaattttttctcataagaaaaacgatcttgaaattgggcaactgcttgcgcacgtttagcttgtcttttttcatagctaattaagagcttttggacgccctttctttcatcagcgcgtaattcttctaattgttcactacttacttctccttgaagtaagtttcttatttcagtaatggtcatctaagatcaaacgtaatccttcccaattttcctttacgtaaacgttgaagcataaagagtgaaaacttatcataatcatcccgcatgccatatttgttagtcatagctagtaataaatccggattagacatattttcaagctcttcatttgttgcttgggcaaatttggtaagatcctttttatagttttgcttcaaaaattcaatcacaaataaggcgacatcatcaggatgaaaaacatcggccttaattgcgccacaagctgctaacttatagcctacttcttgatcagaaaacttgggccacaaaataccgggtgtatctaaaatttgaacattcgtcttggtctttaaccagctttgtccacgcgttacacctggcttatctcctacgattgcggcatttcttccaaccattcgattgataatcgttgattttccgcaatttggaattccagcaattgctacacgaatcattgggttagaagcaccctttgcaatcagcttctctgtctttttcttaccagctaatttaataatcttaaacaaactcgtcatattggtattatgctgagcatccattgagataacaaaattgccttcatcttggaaataacgagtccactttttagtttgaattggatcagccaaatcagacttgttcaagataataatatgaggtttcttcttggttaactgtccaatcattggattacgggaagaaactggaaggcgcgcatctaaaacttcaattaagacgtcaatcaaatctaaattatcttcaagttgatttttagccttattcatatgtcctggataccactgaatagttgccatttttagtcctccatatcctttagatttaaactcaacgctttctttaaggcaggattatcatcttgcaatttttgagcgactgctaaataaagttgagcttgtacttgcccatttactataccatctgttgtcaagtcatgttccttttggaatttaattacagcattcttggtttcatcatcaaaaactccagtaacatgctttggtaaatagcctaaggcagttaagtattgctgcaaagtagccacatcaacaccagtcattgattttttcaaaatactcatactttggaattgtggcaattttgctaaaggtgattcagaaactggataagttggtttaagccccttttgattgatccaggttccatttggcgtcaaccatttagcaacggtatatttatactctgaatcctcagtttgtccaacttgttgaacagttcctttaccataacttgtctgaccaactgagacaccgcaatggttttgcactaaagcagctgtaaatatttcactcgcactagccgtatttccattaatcaaaataattggcttgagtgaagtatgaaagcctcctgaaagtttcttatcagagcgaatcacttctttttctttgcgatccttgtactgcataataatcttgttatttggcaagaaataagaagccgactttaaggccgcattcatttcgccacccggattatcctgtaaatcaataattaacttaggatactttttagtattaattgactttaaagcaaccttcaagtctttagcagtattcacgtcaaactgggtaattgtaataattgtcgcattaccttctgtgcgcttagttagactcgattgtgaaattttagcgcgctttaaagtaacactaaaggttgaattagcacgctttagtttcagtgttaccttggtgccaacctttcccctaactaaagaggcaactttagtgaactgagccgcgctgacttttttattatcaacagccacaatctcatcgccaggcttaatagtactctttgaagctggagaattggcaacaatagaatccacaacaactttattgttgcgtactgccatctgaatgccaactccgccaaaagtcgagccttctaagatactattaacttgctcttgattagcaccacttaatccttctgaaaagggatcattaagactatcaagcatcccgttaattgccccttggcgcaatgtttgcgatgaaacttttttataatatgaaccttgtaattgctcatacactttttcaacttgataaaaaggcgactttaattccttaacttccataattccaaaggtcaaacctgcaccaattgccgcaccagctataccagttaacaaaaattgagcatatttgggaagatgtttctttttattttttgtagtcttcttttgatgagaattattgggttctacttctgccatattagcctcagttcatattgtctaaatataattgatatgccttgtcaaaaacactcatgcttggtaaatagccagcatttaattctaaatagtctgataatttttcatagtcttcttcttgttttggaaaagaactatcgtgttgagcattattagcaaattgagcaatatcatctactgatcctggatttctttgcgtcattaaaaagcgataaaagctttcacgataagccattaatagtcctccattgtatagaatactgcatatgctccgctgcctgcgtgagttgaaataattggactagttactcgggttaagactttgatatctggattgatctccttaatcttttcagtccaaactttcatatcttcaggagtatcgacataagaaattgctacttctttaatttcatgcttgtgttcttcaatatcttttaaaacacgtttatcgcaatttttagaaaatttcttaccgcgtccttttttagcaacttctagatgaccacctggcatgtgcaattcaattctgatatttaataaggtagcaatcttacctgcaagcgggccaagacgaccccctttaattaaattattgaggtttacaaccatcatatagagtttttgttgctctttaagttgctcaacgtgggcaacaatttcttcaagactcttaccctcttgtgcatctttagctgcagctaatacttggtaagcttctgcgcggtctgttaagtcagaatcaattaaagttacttctttactcttaccaattaagtcagcagcttgtctagcagcttcaattgttccacttaaagagcgagcaagaaaaataccaacgacttgactgccatcatcagtcaaatctttaaatactttttcaaaaactccaattgatggttgacttgtcttaggcaattcttttgatgcatccatctttttcacaaattcttcgcggctaatgtcaacaccatctgtataagtttgaccatcaatggtaatggttaatggaactacagtaatgtcatatttatcaatttcttcaggagttaattgaactgaggaatcagttactactttaatcttagccatgctagctcctatcccctattcttctttaattattattctatgttagaatttattaagtacaacctcaagtatatcaaaaatacaaaaatgagttaaaatttattaaatagattataaaagtatataaggcggaatcaatgaatgtcttttaaacaattgtggcaagagcccaaaaatcgatcaaaaacatacaacattttaaataatatttttagtgctattactcacggaattggtttttgcctagcagtagctggattagtaattttaattgtaaaagctgcccatacaggaagtgcagtaagagtaactgcctttactctttatggctcaagcttgattattctctatctcttttcaacgctctatcacagtttgatttttactagggctagacgagttttccagatatttgatcattcttcaattttcattttaattactggaacttatacgccctatactcttgttgcaatcggcggagctaagggatgggtaatgtttagtattattctagctttggcaattttcggtattttgttttatattttcaaccaaggaaagcatgttgtcttagatacgattttgtacgtattaatgggctggattgtaattattgcttctagcaccctttatccagttcttgggccaactggcttttggctcctagtttggggcggaattgcttatactgtcggcgccattttattttcaatgcgcggagttccttatatccatgttatctggcatatgtttgttttattaggatcaatcctgatgtatttttcaattttattttacgtttaaaaaaaggcaagtagtgatctttagtttcactactcgcctttttgctagctattttaattatttaaagaaagaaattcagtaattgctgcttcgttgttgctaattactccttcaagaactgcctttttaatttcttctagtaaaagtcccactcttggtccagcaggaacaccattttttaataaaaagtgtccatcaatcactaaatcgtgattatttttaattggcaaagcttcataacgatcaactaaagcactaccgttaattggctgacctaaaatatgtgctaaatcaatggtcgaagcaatagtttctaaacctgcttgatataaatcatagttacttggagctcgtgaactaaccaagtcaaagaaagtgactatatcagcgacttgacgctccattgcattagaattcttccacattcgcataaaagaaggaatcttttcatttggtaattttagtaaaataatcatcaaagcccatagattagcttcagtagtaggactaaaattaagttgaggataaagagctaaattatcttttttacctttaaaacccggaacttcttcagataaaccggtgtctaagaagatctgaaaggctttttgactaccaggggcaatccccattttgacaaactcgtcgcgaattcgctcaacagaaatcttactgagcagttcatgattgtcactaattgcccgttcagtttctggttcaagcgtaaattgcagttgactcataaaacgaactgcccgcatcatccgtaaggcatcctcgtggaagcgattctcagctttaccaactgcgcgaatcaaatgcttatctaagtcgcccaagccatcgaagtgatcaatgacattgccatcaacgcccatagctaaagcgttaatcgtaaagtctcttcgcttcaagtcttctgacaagttctgcacaaaagtcacatgatcaggcctgcggaagtcttggtatcctgattccgttctaaaagttgtaatttcataactttcaccttcataaagaactgtcactgttccatgcttgattcccgtatcaattgtctttttgaaaatttgcttaatttccatcggataagcactcgtggctatatcaacatcatgaatatgacgatttaagagtaagtctctaacactgcctccaacaaaataagcctcataacccgcttcattaattcgttttaaaactggaagcgcggcggtaaaaacttccggtaaattggtaattttcatatattccctattccccttatttattccttagttttgtaagaaagaaggaagtaacatgactaagattttcaataaacaactctttaagcaattattttttatcactcttggttgtagtatttatgcttttagcttagatgccatcagcatccctaacaaactagctgatggtggaataagtggtattgcgcttttacttagatattggttccatattaatcctggtctatcaacgttacttctaaatatccctttaattataatcggatatcgttttatgggcaaacggctacttgccttgaccatttggggtacgctttgtttatccttctttttatcattttggttacacattcctattataaaccaattaaatttagaacatgatctttttattgccggtgtcttagcaggacttttttctggctttggcatcgggattgtctttaaatatggcggcaccactggtggaacagacattattgctaggatattagatttaaaattaggtatacctgttggtaagtcgcttcttgcgttagatgcatttgttttgacaatttccttaacttacttagatatcaagcacatgatctacaccttactggctagctttgttttatcccggatcacggactcaattcaagccggtgcttacgcagctcgcggactctttattatttctgataagtatgaacaaattgctaagatgattgatgtgcagctagaccgtggctatacatttttaaatgctgaaggcggctatgatcgctccgataagaaaatgatttattgtgtagtttctcctcgagaaattagccaagtcaaagaactaattttgcgtgaagatcccaatgcctttgtttctgtagttgatgttcatgaagcattaggtcaaggctttacttacgaaagaaaaaagagacatattttctttagaagataattaggaaagaaactagtcgttttgattagttcctttttttgtacttaagcataaattcatgcatcgcattcattggaaaaaatagcgaattatcttcacgtatagaattagaatcagctattttactgtctaaataggtaatatattttgcattagcccctctatattcatccgtatctttataaattatttcaaaatataatttatcttttaatctattatctacttcataataagatgctattgcgtcctcaccaactcctattctattggtggaccaatcttcatttgttccaaggtgaatccctatcgcccaagctttatttttccaattccatattccacgctcaaaccattcatcaccattcgcttcatcaaaattatcaattatatcttgatcgttttttaggcacagataattatatttaaaaatatcagggagagatggaataattattaatgctttttccatcacatactgtgatccgagaccgtaaaatagtttgtgtaaggatgaattattccttaatttaatttcctaaaacattagaaaaaggagttcctttctcgtatgattggtttgaacaaaaaacatacagaaagaagaactccttcatgaatgattttaccaaaaatataactcaagctctattcaatcaagataaaattaatgatttgcttcgtcatgaaatccaacaagctgttaatgacatgttagaatctgaactgactgcctttttaggatatgatccctatgctagaaatggctggaatactggtaattctagaaatggtgcgtatttccgtaaaattgatacccagtttggatcaattgaggtacaagtgccacgagatcgcaatggtatgtttcatcaacacactctgccagactataaacaacatactgatctcttagaagatatggttataaagctttattctaaaggtgtaaccactagagaaatagctaatttgatcgaaaaaatgtatggcagtcattatagtccagctcaagtgtctaatatctctaagcaaatgattcctaaagttgaggcttatcacaagcgtaagctgagcgataagttcttttgtgtttatcttgatacaacgtatataccgttgcgtcgagaaacttttgaacgagaagcagtatatattgccattggcatcaagcctaatggtcacaaggaagttatcgactactgcattgcgcctagtgagaatattgaagtctggacggcgttgctccagaacatgaaatctcgtggtttaaagcaagtagagcttttcctttcagatggcgttgtcggcatgaaagcagcactggcaaagacctatcctcaagctcatttccaacgctgcttggtccatgttatgcgcaacatctgcgctaaagtacgcgtggacgatcgcgaggcaatcatgaacgaattcaagcagattcaccagcaagccaataaagcggctgctgttgatgtattgcatgctttttatgccaaatggaacaagagctacaatcgtgtcattagaaacctgaaagacatcgagccagacctgcttgttttttataattatcctaagcagatcagggcttcaatttactctaccaacatgatcgaatcctttaataacgtcattaagcgcaaggctaagcctaaagcggagttcccgactgaacagtcgcttgatacttttattggcatccaagcaatgagctacaatgaccgctacttcaaccgaattcacaaaggctttggtcaagtccaggataccttagaatcctattttgaataaataaaacgttaaaaaaacaatttacgagaaagatctatttacacaaaaaatttgacagtttctgtgatccttcattaataagtttactattctcgtttctagttacgtctagaacattaaaatctatttttcttttatctgcttcgagccaaaaattgacaccgactaaatttatttctttcatattgctttattaaaatcctattttatttactaaatgtaagtagcgatttggagttaactccaaactttttcttatttatatatttttagaatatacttaatcatttcgactaaactcttgcgagagttaaaataagaatcctatgatatcaataggtttttatacttcaaaaagcaaaaatttatttttcaatctatttgcggttaaaaaacggtcgaaaagcttttcgaccgtttttattgcgcgcgtaaaattgttaaagaactactaattgataaaaataaggcaaaatttatcttgaatgccgtccttttccaccaaaaatctttcgccgaaattttttagggatgaaaacattgcaccaacaagtactattccggcaagcccacctattatccaaggactatgtttttcagccttatctttatcgatttcatttttattaactatttttaattttttatagctgcttttgctcttggaagattttgaactacttgtaaaagtacctgaattttctatttttgaagaacttacaccatttgtatcttcactatcaatatctttatcttctatctcactatcttcaatagaagactgcatttttcgtttcatctcatcccttgaaggcatacgattcttctttatccactcatctactgtcattgttgcatgaaacatattatcatcatcgtaatatcctggagctatatatccatcaggcgttccatgataagccttatattccatcaaagtagtattgataattccttgttgccttggatctccccaaccaaaattgttctttgaacgttctttaaaagcttctgcatcccaatatccagctttaagataaacaactccacttttattattcggatcaacttccaggtcgcgtcctccccatggattacctgcaatttcgagcttaccaattttttccggcaaatgtcccatataaaagaattttttctctggtactccattaactacttttactgtatcagccttaattatctttaaaaccttaccagtatcttgttcaacgcattgccaatataaagtttgtgtagttacttcttcattttcactctgctgctggacattttgatcagcaaaaacaacttgattaggggcaaaaataacttaacaagttgaaactatcattatactagctactttaggtatctttttattcttcattacatctcctcaatcattttttgataataccattctctcatatctattttagacatctcaacaaaaaacggtcgaaaagcttttcgaccgtttttacaaccgcattgcggttgtaaattattttattccttcacattcttcaaggccttgcggacggcttcgctgattgcccgacttgtagcagatgcaccagaaactgcatcaacatctggagtattttctttaacaatacgctctggaatgacctttagtgcttgcttgccgacatcttcactttcgtgatcctgtacaatctcgacatttttaatcccgttatcataagtaacgcgtacaacaagcttgccgccaataccagcattagactcgccaatatattgatctttatcaagcttaatgtccttgaccttgtcaccatctgctaattcattaatgccgttgtacttgtcagaagcttcatccgtaacctcatcagtaacattagctgcttgctcgcctgcaatcttaccaaaaatcaaacactcagctaagttaccaccgccttgatattggtttgcgttaataccacctaattcaccagcaccatacaagtgcggaataggcttatcattaacatccagaatttcagctttagtgtttctttccggtccaccctgcgtattcaaaacattgtaagccatcttaattgcataaaatggaccatcttccgcaaatttagccattgacttaacatctcgaccaaattgatcatcgtgaccattttctacaaaacggttgaacatctcaacttgttcctttaagccgtttgcatcaacaccagtcttttcagctagctcttcaagcgtatcagccttaatcaatttttcattaaatttatcatatggaatctgccctgcttcaatggtttcatattgtttttgatcaaaaataatatatggtttctcatggctacgtggaacgcgccaaataccatgatcaaaaatgtgtccgtgacggtttggaccagcttcgttaaagtaccgcttaccatcatccgccaccataaagacgctaccgtggttaagctctggccagctgagaactaacttagatctcttgccttctggtgtatcaaatgataaaccatgcagtaaaccaagagattcgtaattatacatgtgccacatcttagcgccgacttcttgcgccatcgaaataccgtcacccttattgtaaatagtacctaatggagtaagtttaggtgcagctaagtagttttgaatcatttccttgttattttcaaaaccgcccgttgtcaaaatgactcctcgtctagccaagacattgatcttctggcctaatttttcaatctgaacacccttgattactttagaaactggatcttgaatcaagtgggtagcccgtgcctcataccagacatcaatcttgtctttgcggtctagaattttttgtcttaaaagtttccaaagtgctgcgtcgaaccaaccattgtgaaccaaggtatagtcataagtctcatgtccctttagttcaggatattcttgagtaactccaacacggtattcctttggtatcttgctaaagtcattgataaaactaactggttcaacgcccaagtacttctttacatattcccgcatgttgcacattccgcgaacataggtctcaaccatatcctctggcaaatccatcggacgcgttaagccaagatagtattcctttaacttgtcatagtcggttccagtcccaagaagctgggcagaatacctagtgttaccaccttcatgaccgtaaggagcaacatcagcaattaatactttagcgccattgtcagctgcaaatctagcagcagttgcacctgctccaccaaagcctaaaacaacaacatcataatttgctttccagtcaataactggagcttttgtttcttgttccatatttatttcctcgtctttttgttatcgcttacaagaaatattataggctttgataagaactttgtataataattagcagtgttaagttatggttgtgttatttaatttagggtaaaactaagctacctgccgtggttttggaaagtagcttgattgttcttattgttttctaacggaaatagtgaaatctttttctgaaatattataaaatttaaataatagtttaagttcttttaaaatatttactgctgacaaatgagtatataagtatattccatctcttatttcactaattccagattgattagaagatggaagccttccaatgaggggattttgaacagaaatatctctttcactaaatcgaaaacctattaaactatctaaaattttaggattatcttgatccaataattgtactacttctattaataattgtttaaaagttttggccgtataatttgcgccttgtaaagtaaatgacacaggctttctacctttaattctctgaagatctgataatgaaagcttatctactaattcaaattcaatagacggatctgtaatacgcgataaataatacttatttaagagaattctacttaatcgtattgcacgtttcttaatattatttatggtccaactgtcttgatttatcacatcctgatttaaaatttgaatttttgaattctccttgattaatttctttttctctttaaagcttttattagataattctgaattatatcctgtaatagacaagtttcctaatgtatgaacatatttatcatgttcttcgtcagaaataatctgtttccaactattacttaatgtttgtggcatgatatgttcaatagtcaaattatcagtatcaattttttctttgaagtcattattttcaatatccagcattaacaatctacataattctttattttgatacaaattttcatgttctaatgcatactttacattttcatcatttggaatttcatctttattcttttgactaaacaaatatttattaattgactcataatatttatttttattattagtaaccttaaacacacgaacataaagataagcaaataaagtatttaaggaattagttggaacattacaaattgatcttcttattaagtaaattgtaattaaagataaaactttagataaagtttcctcatcaataatcttattttcataatctttaaatacatgcattaaaaatggatagcatgtagattgcttaagttgttttaaatctagcaaatacccttttattttatcattataattagaattattcgggtacaaaaaagtggcataaatattagcatacatattcaattcttttaactgagactcatgagtaaaattatttactctaaaaagatttataaaagatgaataaacttttctttctgtaatagttgaattggacttggtaataacatattgtctgaaaaacaaatctaaagtttcattgttattattttttcttaatttattttcaattggaagccaatattcttcaaagagtttatcttgatcttgatcacccattaaaaggaaatttctaattaaatctgtattagttagagcaacccctgtagaattgatactctcaaaaataatttggggatcatcttctcctgatttaagactaattcctactacttgtaatttctttaatgctagaagaatttcaattggtttaataccattattaatccaatttgagaatatattttttgcaattttataatttttataaatatggccattataatccatatcatctaaattaccattcaatagccgttcatactgaatattgtcagacttaattggttttagtttaattttatattcatctgatgaatacttatttgttagcaaagaatctatcatttccaaaacttgctgatcactctgtacacatagatcttttaatgcttgtaaaagtattgtcaatgtcgtaatgcgttgctgcccatcaataattagaaattccggcattcccaaatcattattgtctgattccatataaacaatggcacctataaaatattgctgcttatttttgatgacattttcaacatcttctaataatctacgaacatttccttctgtccaatcgtaatttcgttgatatacagggatttttaatatcatttgcgatgtatcaaataatctttgaatgatattaaaggtatcagctttcatatatacctactcctttaactcacataattttctcaaatattaagctacaactactccagcattactattaatttcatcaattgctgtttttactttcaaccaaatagttatatctgattcaaaaagttcagaaatcgaaccttgatttgtaaatggagattcctgtagaacatgcatatcagtcagtgttccattcttaacaatgtactcgataatttcatttataaaatagatttgttgcttatttaaaggaacagtatctaggtatttattaaaagcctttttagccgcatgcatatctaatccaactatgctacgtacaaattcgcctggtgccttattaccaatttctttttgatattcttccttacttcccagcttttgccataaaatagattctaattcttttaaatcctggctgcttaaaggttcattgtctctaatcttcaccataagattttcactttgatgttgtttaatataaaattccgcctttgccttatagttctttaaagtatctgtttcaagttcagcgtcatgaatagtcgaatctaatacagtgtcagcaaaatttgtataatataccgttccttttttaggaaggtactgaataagatctctaatactttgccggatatactctaagtctttaacatcagtagattcaacatattctggttgtaatatttctttaattaaatcctttttttccttaacttgtggaatagtcattaaatcagagagtttagaaaccttattacatagatcaatttttagccgcccatatgattcttgtgacatttttgcaagttccattttataaactaaagcatcaaatcttagagcattaggctcatcattatcaggaagaatcaacggagataattccttcttagtatttacaatatcttcataagtcaaattattataattttcaatttgagaaaacttatcaacataagcgagaccgtaaaatagtttgtgtaaggatgaattattccttaatttaatttcctaaaacattagaaaaaggagttcctttctcgtatgattggtttgaacaaaaaaacatacagaaagaagaactccttcatgaatgattttaccaaaaatataactcaagctctattcaatcaagataaaattaatgatttgcttcgtcatgaaatccaacaagctgttaatgacatgttagaatctgaactgactgcctttttaggatatgatccctatgctagaaatggctggaatactggtaattctagaaatggtgcgtatttccgtaaaattgatacccagtttggatcaattgaggtacaagtgccacgagatcgcaatggtatgtttcatcaacacactctgccagactataaacaacatactgatctcttagaagatatggttataaagctgtattctaaaggtgtaaccactagagaaatagctaatttgatcgaaaaaatgtatggcagtcattatagtccagctcaagtgtctaatatctctaagcaaatgattcctaaagttgaggcttatcacaagcgtaagctgagcgataagttcttttgtgtttatcttgatacaacgtatataccgttgcatcgagaaacttttgaacgagaagcagtatatattgccattggcatcaagcctaatggtcacaaggaagttatcgactactgcattgcgcctagtgagaatattgaagtctggacggcgttgctccagaacatgaaatctcgtggtttaaagcaagtagagcttttcctttcagatggcgttgtcggcatgaaagcagcactggcaaagacctatcctcaagctcatttccaacgctgcttggtccatgttatgcgcaacatctgcgctaaagtacgcgtggacgatcgcgaggcaatcatgaacgaattcaagcagattcaccagcaagccaataaagcggctgctgttgatgtattgcatgctttttatgccaaatggaacaagagctacaatcgtgtcattagaaacctgaaagacatcgagccagacctgcttgttttttataattatcctaagcagatcagggcttcaatttactctaccaacatgatcgaatcctttaataacgtcattaagcgcaaggctaagcctaaagcggagttcccgactgaacagtcgcttgatacttttattggcatccaagcaatgagctacaatgaccgctacttcaaccgaattcacaaaggctttggtcaagtccaggataccttagaatcctattttgaataaataaaacgttaaaaaaacaatttacgagaaagatctatttacacaaaaaatttgacagtttcacataagcaatatgttgcttaacagcaaaattatttctatttaattctttaacctttttacatagatcttcaaccaatgttttacgatattgattaaaatcatctgtttgataaggttcttcttgcaatttccgaactaattccatctttaagttaaataaagcactttgcaaagtttcttgaactcctgcttcatgtccttttcccatgcggaaaaaatgaaaattatcacaaaaatcaaaaatataaaattcttgcttatcttttccatctagtaagtgtggacacaatcgagttccacgtccgatcatttggaagaattttgctttactcattacttttttgaaaaataccaagtttaagcattcaggtacatcaattccagtatccaacatatcaactgaaacagctatttgtggtaacttatctggatctgaaaattcatcaattgcactttgagaatagttagtataattatcgattacggttgcatatggttgtccatgagtatttctactaaattgaggatactcttcattgaaaacttttaggatttcttccgcatgacgatgatttttagcaaaaataatagttttccctattttttcgccataatcaatttttaggccctgattcatcaaaatattcaaaactttacgaattgtatctttattaaacaaccatttattcaactttcctgagtctatcttctttggtaaatcaccatcttcatcagtgaaagtttcttcatattcttctttctcttgagtacttagatcatcgtaattaataccattttccataaactttaaatgagtttcgatagatttgtatggcactaagtagccatcatcaactgcttgtgccagatcatagccataagtcggaacaccatcttctagattaaaaatcgaatatgtatttttatcaatatcatctttaggggttgcggtcagaccaaccaatggagcatcaaaataagtgaatatattccgatatttgttataaattgacctatgagcttcatcgacaataatcagatcaaaatgtcccgcagtatataacttctttttatcgtcatctgttgcagtatcgataacattcatcatcgtagcataggtagaaaatacacatcgcgcattataatttgacttatcttcgactaagttagttgaagataagtctggtaacaagtttacaaagctccttttagcctgtgttactagtgcatccctatcagccaaaaataagacatgtttaatccaaccagcattcaaaagaaccttaaccaagcccactgcagttctagttttacctgatcccgttgccatgactaataacgctttgcgtctattttcctttgaaaaactttcacacactgcctgaatagcagctttttggtaataccgaccagcaatattatcatcaactatgatattagttaatggctgacgcactttttgtaaattaaataatttttctaaatcacgcttagaataaatagatgaaacttgtctttcgggatattgattatcaataattctcgtttcaaaaccattacttaaaaatacaactggtctacgtccatattttttctctagtaaatcagcatatagttttgcttgctgacgaccaacagcaacatctttgcatgttttcttggcttcaataagtgcaagaggttggtgtgcatcatcatatagaacataatcagcgtatcctattcctgctttattaggcattcctttaagttctacttcgtttaaccaattttgtccttcaacccaaccagcttctgctagcatagcatcaatgtagattttcctggttttaaattctgatattccaaaaggcttgggattatagctatcttcctgtgcctttctttgcgcagtcatagattcctgcaaagatttgttcttcttcgtcagtttatcaagagaaaccgtagccttttcggctgacactacttttggaataaattccaaacgatattttccaacaagagatttatcaaaatctttcttttgataattactaccatagcaataatcaagcatgtcaaaaaaactaaataaagcctttaaacataaaacagcttcatctagagatacttttcgattagtatgtactgccacgtttcctaatcggcgaatcagatccaaaccttgccaagtattaggatcaacaatatccttaaagtctaaggtgtttatcaaggttaccaatttatcttggtatggcgttcttaaatctttatcaaccgaatacatccacttaactgccaattccattgcacggcggcagtcaataaccgatgttgcaggatcaataacagctactttctcagcagctattgcaatttccacgaaatctttaaattgtggttcttctaataaataatcaaagttagtcacggatagcatctcctaattgactgagaattttgcttgagagcgttttattcaagtatactatattttcaaattttgatttgtcgacttgttggacaaagtttgcaaattcgttttggagagaaagaggaggaatattaactttataattttcaagaaacttaactggcactcttttttgaccagcactcccagtcatatttatctcagctacttttctaaaactatcaaatgtagttaacacatatagccaataaggattggataagttttccagtggtcgtaaaacatgaaattcagtagaaccaaaacaaatatcatttttcaaattctgtgcaattgctcccttgccattttccatacaaggtgtgattttagcaaaaaggacatcattagaactgaaatatgtaaatcctttccttacttctgagtacaatttgatattagtggtatctatatctccattttcagatacagcagacattgggacaaaagatacttctaaatcattgttagttagtctgggatcttttctcttatcaggattaactaagcaaatatcacataatttttttaagcttttatctttattttttatttctggatctccaaacatctcgacaaatcgggctttgattagttcatcgaacttatctaattcttgagatttcattttaataatgtactctaatttatcaagaatattaacaatatcgttttgtctatttttatctggataatttatagttatttctttaagccatttaaaatgtcgattatagcctgtatttggaatgtgtgcattctttaaagcatagtataaatacctataattggcatttttatcagtacatttcaacacttttactccatctgctcctaagaaaaatggagtatcaacatatttaattatccttgtatggtcaccaaaaacgatagctggaatttttttaaatataccatcttcgcaatttgtataacccgcaataatatcttgtccttgatctattattatattttttccatgagttaaatattcttctttaggaattttagtaccctgcctagttacatctttaaataaagttgtaaacttctgaatcaacactgcaccctacaaacctgaatttgctaggatatgtattttctatgagctgcttttacattattttgattaacaattgcatattgcattgtcgtgtctatctgagaatgtcctaaaattttttgtacttgctcaattggcatgcctttatcaatagctctagtagccatactccgtctaaatttatgaggatgaattctatctaaatgtagttttcttccaagttgtcgtaacctaatctctaccccactaattttcaatctgtcatttggcttgtctaaagaaacaaaaagagctggattatcgtcctctctacttcttagatagttaataagatgtacttttgacttggcatcaaaatatactcgtctttctttatctccttttccaaataccacacattcacgttcagaaaaattaatatcatttctattaagtcgaacaagttcacctactctaatacccgttgaatacaataaatcaatcattgcaacatctcttaaacaggaacagccatcacgcagcttttcaatatcttcatcagtaattacattttttaccaatttttctgctcgtattttatgaatacgtcgcataggacttttcaatatataatcttcttcctcaagccatgagaaaaaactagaaatattacggcgaatgttatcaatagttgtctttccgcaattattgattttttgatactcaactaaatattcacgcatttcttccgtagtaattctacgtattggtcggattaccttagccaacaactgttcaacggtaactttgtaatatttaattgttctgtcagaacaaccttccatctttttagcttcaagaaatttagccaagtattccttattactaatttttctttttcgtggttctctttcgaccaaatgttttagcattacttcctgaagtcgctttaattgtgctgcattaagcacttcagccatttcatttattatttcaacaaacttctcatccatagtgaatctcccattttagagtttttcactattaaaccactttttagccaaaatattcttgcattaagctatcaaataatttttgtgtctcatcaagtgatttttgaactgcaacttttgatttgtcgacttgatggacgaagtttgcgaattcgttttggagtgagagaggtggaatattaatatttaagggattaatatctttgttattaatctgaggaacagacgaaccattatttagagtatttaaatcaaccatattaaaatattcaaataaataataagagcttattctagtattatctggtataactcccataatatttaaatcagcgcaaattggaacttttgttaatctttttttatttgtcccaattgctccacctctcttcggaaaaataactgttccaactggaaaaatacttttatttgctgtcttatctgatacaaatcgagttgaagtagttatataagtcgtattttctaaactattcatatccttaactttaacataaggaatatttccgccttcattttcaatattacgaggtaatgtctttccactttttagagtacagcatttttcaatagtactttttttccacttggatttactatcttgcgggtctccaaacatctcgacaaatcgggctttgatcagctcatttaatttttttaaactttcagttttactttttttagttttatcaatattttccagaatacttataattttttgttgattttgtattgaagggactcttatttttatcttttcaagttcactttttctaacagacggtacagtagtagattcagaataattttctaattttacaaatttcataaaataaaaaatatattcagctaaaatagaatcgtttttaggcttaatccctagcacattattgtcaatcaagcattctgtactagtaatcattcttctatttaactttaaagcttcaccgattttcgcaaaaacgatagtttttggaggaacaatctttcctttaagcgtctttactattctctcatctacgtaattatcagatttagttaaaaagtttttgttttcatccgcactttttgaaatatctccaactttataaaaagggtattttccttctaagttaccttgaaattttttagggaaccccgtcccactataaaattcacatatttctcctaataattttatttttatatcttccatacaaacctgaatttgtttttcctttctagtcctttaaaagagcttttaactcttgtaatgcatcatttgcttctttatctaatttttcaatttcagcaataatatccttagttggcggatattcaactggtttatactctatttctttgtaacgattaattgaaagatcataatcattagcaacaatatctttcttaccaaccataaatgacttttcagtctttttacgatcaatttctttgtctaaatgcttaaatcgttcaataatatcaggaatatcattttctttaacaggtgttcgtttgtcatcaagtgaaaagccatcagcggtcatatcatagaaccaaaccttatcagttccgccattaccagtcttagtaaatatcaaaattgcagttgaaactccagcgtatggtttaaatactcctgaaggcattgaaattactgcttctaaattattatcttcaaccaatacttttctaattgatttatgagctttagatgaaccgaataaaactccatctggaacaatacatgcacatctaccacctactctaagcatttttaaaaataaggttaaaaacaataattctgttttctttgttttacaagttttaagcaaatcatctgaaactgaatcatagtctaaacttcccttaaatggaggattagccataatcaaagaatatttatctctatcattattttgatcagataaactatcttgatattcaattttaggattatctactccatgcgttaacatgttcatcgcaccaatacgaagcattgttggatctgtatcataaccagtaaacaattgattatgaaaataatctttactttctttactatcataaatttcagcactttttttagtttgcagatactcagcagcttctactaaaaagcctgccgtaccagcggctggatcgcaaatactatcattagcttgtggattcattaattcaaccatcatcttaataatatgacgtggtgttctgaattgaccatttcgcccagcagtagataactttcctaagagatattcataaacgtccccacgaatatcagctctctttgaaacatctgcatccatcaagcgataaatttcatccaacgattctacaactttagataacaaccctggtgttggtattaaaaatgttgcatctttcatatgtcgagcaaaagaactatcttcaccatttttcaagtttttaataaaaggaaaaacttctgtttgtactacggtaaacatcttttctggtgcaaagtctttaaaagtagaccatctaagttcatcgccatctacgactacatcatcatcaatctgaacttcgccatcaaaaatagatttatagtcattcaatcctagaaatgcattatcttttcttcttctattgtctgaatcatctaaatccttaatgaacattaaatatgtaatttgttcaattacgttcaatggattagttaatccaccggttgcaaaagtttcccaaagattatcaattttgctttttaattctccagcgatcattattaactcctatgtttaacaaatttaaataatatttatattttaccctgaatagtcatttcacaacaagttcattaggaatacatgttctttgatgtttacataataaaaaatatgaattaagtaaaaagcgatctttaataagaacgctctcacttatattcaattttataaataacagttaactaatttcagatttaatttttaatactaagttctttaaaattatgctgtctaaattcttttcttcctcactaacagggaattttataaaagaagcttgaacttcactcccatctttcttaacaaaattaatattagataagtctttttcatctacttttatatcagataaatcttcaaaaaaaaattcatcaaagcctttcgattcatataatttatcgataaaaattactttatttttaaaatccactccaaaattagagactgtaaaatagtttgtgtaaggatgaataattccttaaatttatttcttaaaacattagaaaaaggagttcctttctcgtatgattggtttgaacaaaaaaacacatacagaaagaagaactccttcatgaatgattttaccaaaaatatagcacaagctctattcaatcaagacaaaataaacgatttattgcgcaaagaactccagcaagcagttaatgacctattagaggctgaactgactgcgtttttaggctatgatccttatgccagagctggctggaatacaggcaattcacgcaatggtgcttactttcgcaaggttgatacgcaatttggcgagattaaaattcaggtgcctagggatcgtaacggcatgtttcatcagcacacgctccctgactacaagcagcactccaatgtcttggaaagcatgattatcaagctatattccaaaggcgtaaccactagagaaatagccgacttgattgaaaagatgtatggcagtcattacagcccagctcaggtatctaacatctccaagcagatgattccaaaagtcgaggcctatcatcagcgcaaattcagtgacaagttcttctgcgtttatttggacgctacctacattcctttgcgtcgcataacctttgatcgtgaagcagtttatattgccattggcatcaagcctaatggtcacaaggaagtcatcgattaccgcattgctcccagcgaaaacgtcgagaattggacggaaatgcttcaagacatgaagtctcgcggtctagaacaggttgagctctttctttcagatggcgttgtgggcatgaagacagtgctggagcagacttatccgaaagctcattttcaacgctgtctagttcatgtcatgcgcaatatttgcgctaaagtacgcgtagatgatcgcgaaacgatcatgaatgaattcaagcaaattcatcaacagccaaataaggaagccgcgatcaaagtcttgcacgccttctatgacaagtggaacagcgcgtacaaccatgtcatcagaaatctcaaagagattgaacctgatctgctagtcttttacagctatcctaagcagatcagggcttcaatttactctaccaatatgatcgaatcctttaacaacgttatcaagcgtaaagctaagcctaaagcagagtttccaactgaacagtcgcttaatacttttattggcattcaggcaatgagctacaacgaacgctatttcaatcgaatccacaaaggctttggtcaggttcaggataccttagaatcctactttgattaaataaaagattaaaaaatcaatctacgagaaaaatctatttacacaaaaaatttgacagtttccaaaattagcttctccattattctcaagcttaattttattttgtaaatcgttatacttttgtctttcactagacaaaagttttatcttatttagttgcgctgcattttgtttgttgtctctatcagtaagtctggctttaacaaatttaaatctattattctcatttaattcatttgtctttttattttcaattgatttatctaggcattcactaatgttaatattcacattttttagatcttttttggattgaagtgtatttacaggcgctatatctttaacttcatcactagcacttttatcttgtatagctgtatctgtttttcctaaaacaacgttagaataatgctgatgaattatttttgttactgaaaccagagaatactgtttccagaaacctatattatttattcttttgtattctttccatgcttttttggaaattatcagataattattctctttaagcgaataaactttaactttacgttttattagagtaatcaatagtattactatttctggtaaagcaattatagtaaaagataatagcaagattactaatcctacaatattccatattaaacaagtctttgttctaacatatacttctttattatcaatattgttattcacttacattcaccacttcctgctttttctctaaacggtctcgctcaatctgaaatacttttttcttcattacagcttcattttcttctttatctgaatcattattcataaatgcatcggcaacaacagaatcatttgcatacgtattaaaaatatcttctttttcatgaataatttccatcatggtttcatcgacactttccttagttaacaaacgataaaccataacatttctattttggcccattctataagctctacttatagcttggttttctgtcgaaggtttccattgcggttcacacaaaataactctattagcagcttggatattaagtccaaatccaccagcatctatttgaactaaaagtacattctgatttggattttctgagaatttatcaattacttcttgacgctgattagatgataaatcaccactaataatatcgtctgcaagaaacggcaatttcttatttaacaatttcaaaacataatttttgaaaaatgaaaaaactataactttttcactattttcatgtgaatcaacacaaatattaataatttgctctatcttttgactatcttcatcaataaatgctgctctacgcatcttcatcaatcctgcaataccttcactcacggcttgatcatagaagtcttgttctttttcattaaaagttgaccacattgttgtaagccctaatgctggaagttcatgtaaaacttcttttctttttcgtctcaagtaaacttgagctatatccgtcttataagttttattatttaaattattggcaactttttccgctagagactcattaaaagttaatcatttcatcaagcctattctctagagcagtaccagtcattaacagcttatatttacaatttttaatcaaagcattaacatttttgctacgctttgttgcaggatttttaatcaaatgtgcttcatctactattgcaaaatcaatatctatattttttctactttctttcaatattctgcaatgagaataattagtaagtaatatgcctcctgattcctcccattttgacaaattttgttcttttatagctttatctcctctaaacacaaagcattttatattagtccatttttcaatttctctcttccaattttcaaggacacttagtggactaataactaaacaatgagtctgtccctgatttgaaagatgcgtcgcgactgcgagcgcctgaatagtttttcctagtcccatttcatctcccaataaggtcctttgaaaatagaaaatatatttactgccaaaagcttgatatgatcttaaatgcgctttaaatcctttaagattaagtttagtcttctgaacttcatgtacaatataatctggtagatcagatggattataactttttttattgccagtaatttcttcgattaaagcgtagaatgttgcactatctttttcaaaaagagctttaatttcttgatcattcaaattatcattcaaacagtccctaaatgtactattaacttgaatgcagccgtctaatatcctatagatttcagcttcactctcacaccaatatttaaaagtgatgctatctataaaattagttagatatctattaggagcaatatcttctaaattacctagtttttcttctagttttctataattctctataactactttttcttctatagcttgttcatctggataatttttataagcatttaacaaatgtagcagttgcaacctttgtccttttaacttatctaatgtcaacttaggataaacattagattttaggtcattcagtatctctttagattgtttcaaaatttcagcactttgctgcatatttaaaccatatctctcagaaacctctgctaatgataatgagattacttgtccaacattatcaaaattatcgagaacatctccaatttgttcattatcaatttgctttttaagcatttctataggtaatgaatttaattgattagataactcttcttctttcaagtttttccaaataccacgaatactttcttctacaccatttctgctctgttctgataaaaataaaatcttatttttaaggaaatcacgtatgattttaaaaattatatcttctttagacttttctgtatctaaatttacaaatggatttaaatattcaaatcgtttattttttaagctaatatctaagtcttcaaatgattcagctatttcatcccattcattttctcttttgtattgaatattagaaagcacattcttattttcctcagcaaattctttagctttaagcaatttttgtttaatatcatgattctgaaaaattgataaaaacttagatcgatcgttttcttttataaactgcaaacatacttttaaattgcttaatttttctgagtactttagctggtattgttccattttattccttgattttaaaatggagaacactaaaactatctcgttcttagaaaatgaactgtgcaagacagaaggaaaaaacttcgaatataactgatcataagtcaatttgccatagaaaatttctttaacagacttaggaatagatctaagccaatcatcgaacatatttctttttaaattatctgcttcagcatctaactttctttccaacctaggcaaatctttttcacttaaaaaattttgtatagtatctaatttttgtaataatttttttgcttcaaatttatcgaaactgtcaaattttttgtgtaaatagatctttctcgtaaattgtttttttaacgttttatttattcaaaataggattctaaggtatcctggacttgaccaaagcctttgtgaattcggttgaagtagcggtcattgtagctcattgcttggatgccaataaaagtatcaagcgactgttcagtcgggaactccgctttaggcttagccttgcgcttaatgacgttattaaaggattcgatcatgttggtagagtaaattgaagccctgatctgcttaggataattataaaaaacaagcaggtctggctcgatgtctttcaggtttctaatgacacgattgtagctcttgttccatttggcataaaaagcatgcaatacatcaacagcagccgctttattggcttgctggtgaatctgcttgaattcgttcatgattgcctcgcgatcgtccacgcgtactttagcgcagatgttgcgcataacatggaccaagcagcgttggaaatgagcttgaggataggtctttgccagtgctgctttcatgccgacaacgccatctgaaaggaaaagctctacttgctttaaaccacgagatttcatgttctggagcaacgccgtccagacttcaatattctcactaggcgcaatgcagtagtcgataacttccttgtgaccattaggcttgatgccaatggcaatatatactgcttctcgttcaaaagtttctcgatgcaacggtatatacgttgtatcaagataaacacaaaagaacttatcgctcagcttacgcttgtgataagcctcaactttaggaatcatttgcttagagatattagacacttgagctggactataatgactgccatacattttttcgatcaaattagctatttctctagtggttacacctttagaataaagctttataaccatatcttctaagagatcagtatgttgtttatagtctggcagagtgtgttgatgaaacataccattgcgatctcgtggcacttgtacctcaattgatccaaactgggtatcaattttacggaaatacgcaccatttctagaattaccagtattccagccatttctagcatagggatcatatcctaaaaaggcagtcagttcagattctaacatgtcattaacagcttgttggatttcatgacgaagcaaatcattaattttatcttgattgaatagagcttgagttatatttttggtaaaatcattcatgaaggagttcttctttctgtatgtttttttgttcaaaccaatcatacgagaaaggaactcctttttctaatgttttaggaaattaaattaaggaataattcatccttacacaaactattttacggtctcaatttatccattaaacccaacttctaattaaaacttatatcattgattatacgaaagaagataaattttgtataaactttttcaaaaataaaaagctgacctcacagccagcttttcttctactcttcactattcaattcatctaacatatcttgcatatcaatatcgtcaggttgaacttgcagatacttcttaatcaattccttggtcgtcggaatctctcgcaattcatagaacaagctaatcatctgtctcaagaagcttgcattcttttgaaaggcaggataagcaagcaagaattcgctcttcgccttatcatagtcttcaagtctttgatatgagatagccatattccagtgagcttgtggttcaagttcctcatcatcaagatccttaaataaggcaatatttgcctcatcttggtgctggtgaagatacaagttagataactgcaagcgcaagtcactattgtcgggagcgatttctagccccttcttgagtaggcgctctgcttcatccaattggtttaagttagcagctgcttttgcacccaagctatacaagacctcatctagttcattataagaaagtcctgtctgggcggttctcaatacttcttcattgttatcttctgctgcataagcttgagcaagcaaaggataggcatttacataatctggttgagtttcaatcacttgatctaagtatttaattgcggccttattatcaccagcagataacataattaagccggcttcatacaatgcatcaatactcaagatatcattttcatgactcttaatttcgttggcagcttcttcgtactcacctaattttgcgaggcaagcagcaattctttgacttaagactacttcaccaaaggttttattttcttttgcaagttcgcggtatagtcctaatgcttcaccataatcgccacttaagtaatcaagttctgctaagccgaagttgattgcatcttcttcaggagctaatttatgagcttctaagagcttttgacgagctgtttcaattagaccattactttgataataatcagctaaatcaagcaagctttcaatataagcatcactttctggctttacatcatataaaagctgcaagccatcatcttcatcgccatcatttaataaaatctcagctaagtataccttaaacaagtcttctcttggaaattgagcaatcaaatagcggtaaacttccttagaaagatcagtaaaaccaaggtcagtcaaattttctgctaaagaagctaaaacttctggatcatcattttctagtgcttttttaagaagaatatgattatcagaaaaatcatgattttgaattgcatctaatagttgttcagaataagtcattttttcactcttttcgtttgtgctaacacaataattgtacacaaaaaacgtgccaagctatataacttagcacgtttttattttgctagtaactgaacaattacttaacagcatccttaagagccttacctggcttgaatgcaggaaccttagaagctgggatttcgatttcagccccagtttgtgggttacgacccttacgagctgcacggtgacgtacttcaaaagtaccgaaaccgatcaattgaactttttcacccttagcaagatcttcttgaatagagctaaagattgcatcaactgcagcagcaacttctttcttggttaagtcagttttagcagcaacttcagaaactaattctgccttgtttgccattccacttcacctcccgaaatgaactaatagtattttaaaacaaaacctttgaaaaataagaaaaatgatttattcattattccctgcaataaaattagcacactaagacgcttagttgcaagctttttcgcagatatatcccttttttttgaaattttaagcctatttacgctttctagctaaaattttaatcggtgttcctacaaaatcaaagttctgacgtaattgattaattaaaaatctctggtaggagaagtgcaataattctggatcatttacaaaaacaacaaatgtcggcggagttactgcaacttgcgtcatgtagtagattcttaatctctttccgttaacaagtggcgttggagtgattctagttgcttcaaggagcaaatcatttaagacactagacttaatgcggcgagtttgattatcgtgaacctctttaactagcttcaaaatatcaggaactctttgaccagtctttgccgaaacgaaaacaattggagcatagtctaagtattggaactcttgtctaattgtgtcctcaaagtccttcatacttgtgctatctttcttaggaagatcccacttgtttacgacgataattacccctcggcctgcgtcgtgagcatatccagcaacgtgcttatcttgttcacgaatgcctgtgctagcatctaaaactaaaagtgtaatatcactttcttcaatggcactaatcgctcttaaaactgaatacttttcagtcttctcatagaccttaccacggcgtctaataccggcagtatcgacaatagtatacttttgcccatcattagtaaaagtcgtgtctatggcgtctctcgttgttccttcgatgttagaaacaattacacgttgttcacctaaaatagcatttaccagtgaagattttcctacattaggacgaccaattacactaaaacgaattgaatcatcttcatgttggttagccttatcgccaaattcaccaacaattgcatcaagtaaatctcccataccagttccgtgactaccagaaacaggaattgggtcgcccaaacctaaactatagaaatcataaatatcagttctttgttcaggattatcagccttgttgactgctaaaataattggctttttagttcgataaagcattttagcaattgtttcatccatgttagtcatatgctgagtaacatcccccaacatgacgattacgtcagcttcatcaatcgcaatttcagcttgagccttaatttgctcttcgatctcaccagagtctaaagtaataccaccagtatcaattaggataaattcatggcccatccattcagcacgagcataaattctatctctagtgacgccagctttatcctcgacaatagcgacgcgagaattaataattctgttaaaaatagttgatttaccaacatttggtcgtccaactaatgcaacgatgggtaatgacatattatttctacccctttctatttatctaagaaataaaaaaagctgaccggagtcagcttttttagacgaatgacgattaatccttatctttaagttgatcaccaataatgtcacctaaagcaaaaccgttgtcattgtcattcatgtacttatcagctacagaatcttgacgacgacgtggacgtgagttttcactcttagcagcattaggatcagcttgcttgattgacaatgagattcttctgtcacttgggtcaacgctcaaaactttaactttaacagtttgaccaacctttaaaacatcacttggcttatcaacgtgcttgttagcaatttctgaaacgtgtactaaaccttggattccatcagctacttcgacgaatgcaccgaatgaagttaaagtcttaacttcaccttcaatgatgtcgccttcatgtaaaccttcagtagcttcttcaaatggggatggtaaagtttgcttaattgacagggagattctgtgtctatcgtcatcaataccgataactttaaccttaacatcttgaccagccttcaatacatcacttggcttgtcaacatgcttgtaagaaatttctgaaatgtgaactaaaccgtccacaccaccaacgtcaacaaaggcaccaaaaccagttaaacgtgatactttaccttcaacagtatcacctacaactaattgtgaagcaacgttttcgaatgcttcttcacgttccttttcgattaagtcttttcttgaaagaattaatctgttcttgttaggatcaatttcagtgatcttcaagttcatcttcttgccaatgtaaggcttcaagtcagaaacgtaacggttagaaataagtgatgctggtaagaaaccacgtgtaccaacgtcaactaataagccaccgcgaacagcaccagttacagtaccttcaacagtcttgccttcttcaaagaccttttctaattccttgtaggcttctctttccttcaaacgagtaactgagaagaagaattcaccgttttctttatcgccaccagctcttctaagaactaaagcttcaaacttatcaccaggttttaccaattggttcaaatctgcgttacggtcgttagtgaattcacgtttagtgattacaccttcaacacctgcattttcaacaccaacagcgatttgtccatcttcaacacttaaaacttcaacgttaacaatgttgccgacttcaactccctgcatttcttttagagcatctaagaattgattactattatctgtcataattacctcccaatatcatactttattttaaagtacttgatgtcttttttccacacttttgtttaatttttttgctttttttgaattatctcgcttattttagctacaacctcatcaatagtaaggtttgttgtatctaattcaattgcatccgctgctttttttaatggcgaaatttctcgatgagaatctttataatcgcgaacttcaatatcatgttcaatgtctttcaagtcttggtgaattcccttttcttgaaaatctaaaaagcgtctcttagctcttgatgcaacactagcgattaagaaaatctttacctcagcatctggtaagactgtcgttccaatatcacggccatccataataacatcgtgtttaccagccatctcacgctgtaattcaaccatcttctcacgaattgactttaaggctgacacttgagaaacattttcagtaatttccggcgttctgatggcgattgatacatctttgccatttacataaactttctgttctccatcttcttgcttaaattcaattgtgctcttgtcaactaggtctaagattgccttttcatccccatagtcaacgtgattgtcgtgtgcaattaatgtacatgctcgatacattgcaccagtatcgatataaatatagcctaaattatgcgcaataattttagcaactgtactcttccccgctgatgcaggaccatcaatagctacttgcattaaaaaattgagtcctttctttttcattcaaagtaaattctaccataaaacaaaaaccagaagtcactcgacttctggctaaatataattcttttagaaattacgttttacaaatttttctagaacaggtaataaagttttcgctaaaatcaaaacaacaatactgttaatcaaacccttaatcaagttcaaaggaataatagcagaaacaacgtaagttaaaagcgaggaatttaacttaaatcccattaaagaaatatacattggagttaaaacgaaataatttgctaatgacattactactgttaaagctaatgtacctacaattaaaccaaaaatttgatatttggctttatcctcgtgttttttactgatgaaataaaacggcaagatataagctaaacttgctaaaaaagcagctaattgtccaatcattgaaattgggttaaagccagaaataaacagactcaataaagacttaaagagtgcaatcatagttccgcctagaggtccaaaaactaaagtgctcaaggcaacgagcgaatctgaaaagtccatcttcaaataatcaaagcctggaataatcgggacttcgattttcataattaaaaatgccagtgcacctatcattgcccaggcgagccaataagcaagtcttacatgacttaaactagtttttctttgcatgatatattcctccataacatacaaaaggcctgttgcttcagcaacagaccttattaatctaaatcatgtttagttttaagtctgtcttcttccatctagactttaactatcggtacctgaggttcaactacatcgtagctcgcggactctaaccgccggtcgggaattgcaccctgccctgaagacagcatccttttatttactttttacaagtaaataataatacttcttaattaaattgtaaataataatgttctttaattacttaagtttaattgattgaccaatactaatactatcagctgattctaaaccattaagctgctctaaatgatgcactgaagtgttattttcacgagcaatttttgataaagaatcaccttcttgaacagtgtaagaacttggagcttgattttgtgatgagctgtttccactgtaattctgccaagtattttggttattttggtatgaattttggtttgcttgttgagtttggccttgagtggtagtttgactagcactagaagcataagattgtgtactgctttggctagtttgactactttgagattgtgattgactagttgtagctggagtcacatcatgagattgacttgaagatttcttctcctctttctttacgctactcttagacttactcttctttgatgagctacgcttaggctttttactcttagatttatgagacttagaagaactctttgaaactttaacactcttttcagccaaattattagaattagagtgcaattttgaagaaacaatcggaatcaaggcaatcaaaattattgctacaataatcaaaccagcccataactgactatgttttgtgcccttagagttcttttctggtcgactaggagttggttcaggtgcaggctctgaatgatgacgatgatgcatcgcacttctagatgttgtcggacgttcaaaatgcttgtaaggacctttaggttcttgattgtcctgagatttattttccttcattccaaaatcctccacaattataggttattagttttattttatcatagcttgacaaggagcgttagtcagctaagtgatttagtcgaaagacttcttcatgcgtcaattcacgatattcgcctgaagtaagtgatttcaatgtcaagaaagcgtatttttcacgagataatttttcaacgaaatgatgaactgcttcaaacattcgcttaacttggtgataatgaccttcatgaatcgttaactgaacaatctgagtatttttcttttcatcagtctttaaaatcttcaattttgcaggcgcactcttgcgaccatcaattcgaaccccatgagtaagggaacggatatcttctggagaaagaagtcctttaattttggctacataaaccttgggtacttcattacgagggtgcatcaatttattagctaattcaccatcattggtcatcaataataagccagaagtatcatagtcaagacgtccaactggatataaacgatatggtacatcttcaaaaaagtcgacaacagtctttcttcccttgtcatcctttactgaagaaattacgccacgaggtttataaaacaaatatgtgtggagtgtttctttctcgattggaactccatttacttcaatcttatcgctaggttcgactttcgttccaagttcggtaatttttttaccattaacagttacttgtccagctgaaatcattttttcagctttacgtcttgacgcaacaccagcttgggcaattactttttgcaatctttcagccattttactctccttcatcaaaatttatttctttgctattttgctcatcttgatcaaataagttcacaggattgtcatctgcttcaaactcttcaattactggtaaatcagctaaactctcatagttaaaatactgtaagaaatagtctgtagtcacatataaattagggtgtccaggcacatcttttttaccatttactttgattagtccacgccaaactaaagtctgcaatgctcctgatgagttaacgcctcgtaagtcgtcaatttcaacccttgttatcggctgacgatatgcaataattgagagaatttcaagagctgactgacttaggttctttgataaatccttttggaaaaatttagaaataacgtccccgcattctgcactggtagttaatttataagtgtgattaatgcagatcagttgtaagcctgaattctcatcatttttaagtcgatcttttagatgatttgctaactctcgtaatgccgatggtgaaatttccaataattgcaataaattatctgtttctaaaccatcatcccctgctgcataaaggagagcttctaattgtgcttctttacttgccattggtctcaactttctctaattctaggtcaccaaaatctctattttgctttactaaaattttatgatcacgacataattctaaaactgctaaaaacaaaccaattacttgatcaagatcctgaaaatttttaatacagtcaaaaaaactagtcgattttcgatgatgaagtttatccttcaaaaatgtcgtcatttcttcaatagacgcctcatgaacttctatttgccctacttgtggttttcttaatttaaagcgctctaaaactaccttaaaagtattagcaagctcatcacttgtaatttctcctaagggaagtggctcaactttcttttttggtgaaacagacggatccttagccacagtaattggcatttcttcatcacgctttttgaaatattcagcaattctttgaaaaaccgaatattgaactaactgctcaactaattcagcacgcggatcttcctgatattggtcttcctctacaaaatcatttttgggaagtaaatattgcgatttaattctaagcagagttgacgccatcacaaaatactcgccagcaatttgcaaatctaaagtctgccagcgagctagattagctaagtattgcccagtaatcttcgcaattggaatatcgtaaatatctatcttttgtgatctaatcaaatgcaaaagtaaatctagtggtcctgtaaaattgggaagatctaaagttaattcatcggcattattcatcagtcttatcttcctttaaataacttaataaaaaagcccagtcaggtaaagtggtaatcattttatcaggataaagatgctttaaatctttcattaccaagcgtttagtctcagaatcacgcattgttggatcaagagaaagatagcgaataattataaaatccttctcttcttgaataccaataatacctctggcattacccttttgtttataaataagaacttcaaattgattagaatcactagtatatagtttcatctcttcttgtaagttcttaatgtttttaaaatctggaagataagacaaatatcccattacagttttttcatagtcttttttatatttgctgatcataatatttaagcacgtggatgtgcttgattataaacctccaaaatatgtttctgcgtcagattagtatagatctgcgtagttgtaatatcactatgacccaaaatttcttgaactacacgcaaatctgccccattttcgagtaaatgagtagcaaaagtatgtctcaaagtatgaggagtaacatttttagttattccaatcagctgacaatacttttttattttctgccaaacagcctgtctagttagttgatgaccatgattatttaagaaaattacatcagtaaattgaccactttttaatacttgggcatccctaacatctgtttgatatttctcaagccatgataaagcgacttcagtaattggtacaagtcgttcttttgagcctttgccaagaaccctaatgatttttaaatcggcatgaatatcaccagttcgtaaatttattaattcactaacccgcatcccagttgcataaagtacctctagcatggcacgatccctaattcctagtggtgtattcgtatcaggagccgcaagtagtttatcaacttcttcttcgcttaaagcggttggcagtctccgttcactttttggggaatcaatttttactaatggatcacgttcaattatatcctgtcttaagagccattgatagaactttctcaaactagagatcatccgactaattgaagttgttgcctttcccttgtctttttgtgtagcaagaaaagcgtcaacaactagataatcgacttcccagcttgtttcattttgatcttgtaaataatctaaatattcttctaaatcagttcgataagaaataatggtattagggcttaagccacgttccacttgactgaaacgtaaataatcttctaaattatccttcatcgtctgtgtctgattcatctttttctaccaaactaattgttcctgcatctttatcttcagtaattaatttattttttaacaaatgacctaaagcacgcttaaaggctgacttagagatgccaaagtgattcttaatttcttgggcgtcgcttttatcataaaaaggcaaagtcttagttgcctcgcgacgtaaacttaccaaaatcatttgagcatcatcatcaatctcctcaaaccctcgaggcagaacgctcaaattcaatctaccatattgactaactccgataacgcgtgctttaattttttgccctagacgcaaaggacgaaacatttcagatttatggacaaaggctaaataatattgatcagtaattacgaaagatccaacttcatagttacggtacacagtaccagacatatttttattttccaaatgtgctgggaaattggcagctaactgttcaaaaacgtcttcttctgccattttagcccaaatacgttccttatcatcagtctcaaggcgtaccaataaacgatcatctttctttggccattgatctttttcaagcggaagatcatctaaagaaacaacaacatctttatcatttaatccaatatctacaaatacacccaaatcgcgacgcacttcagttaccgtagcccaaccatactgatctttttgagcaaaaggatagaattgtgtcatttccttctttttatctttattttcatagataaagccctgtacttcgtcacctaaatggattggttcatcttgggtaacttctattttttttaattcaaaagttacgccatcaacctgtacataaaaagcagattgattttcatcaataacttttccttttcttatttcacctaacatatcagcgcctcaatctttttaatttgtctattactatatagtataaggaaaaaaagacaaaaataaaatagccagctttcgctgactattttaataagctaatcaatttagattaaaggttagttgcttcaccttggtaaacagcaccacgacgagcatcaacagtaatcttagaaccatccttgatcttttcaactgcatcagtagcaccaacaacaactgggataccaagtgaaagaccaacaacagctgcgtgactagttaaacctgaagcttcaactaccatacctgaagccttcttgattgctggtaagtaatccttatcagtagtcttagcaactaagatgtcaccatcttgaactttgctgtttgcttcttcagcagaagttgcaactacggctttaccaataactgattgttcaccaacacctaaacctttaacaagttgggtaccgatcaattgtaacttcatcaagttagtagtaccagtttcgcccaaaggaacaccagcaacgataattactaagtcgccgtcttttgcaagaccagtttctttagcaagttctgctgccttgtcaaacatttcttcagtagtcttaggcttttcaaccaacattggctttacaccccaaacaacacctaatgagtgttcgatcttttcatcgaatgtcatagcgatgatgtcagcgtttggacgatacttagaaatcatacgtgcagtgtaaccagattcagttgcggcaataatagtcttaacgcccaattcttcagcagttctaacaactgattcaccgatagcttcagtaacgtttgaacccttgtattcttcaaatctttgaagagctaacttgttacgcttagcaagttgcttttcagtacgcatgtcgatttcagccatagccttaacagccttaactgggtaaagaccgtttgcagattcacctgaaagcatagttgcgtcagtaccatcaagaacagcgtttgcaacgtcagtaacttcggcacgagttggacgtgggttttcttgcattgagtcaagcatttgagtagcagtaataactggcttacctaatgcgttacatcttctaattaattccttttgtacaaatggaacattaataaatggaatttcaacacccatgtcaccacgagcaaccattaaaccatcagaaacctttaagatttcatcgatgttatcaataccttcttgtgattcaatcttagggaagatctttacgtattcacaatgtgcttcttcaagcaattgacgaatgtcaagaacatcttgtgctttacgaacgaatgaagcaaagatgaagttgataccttcctttaaaccgaacttaatatcgttagtatctttttcagtgatacctgggaggcgaatttcaacaccaggagcgttaacacccttcttagaaccaattaaaccagtgttttgagcttcacaaactaattctctcttagcgtcatctttttccttaatcaaaaggtcaactaaaccatcatcgattaatacgtgaccgccaacgtgagtatcatcgtaaagtccatcgtaggtaacgtggatcatatccttgttacccttcttagtgtcatccatagaaatacggatagtgtcaccagtgttaatagtgaacttgccgccttcttgttcagtagttctaatttcggcacccttagtatcaagagcaatgccaagaagtttaccagtcttcttttcaatctcacgaaccatgttcatacgtgcacggtgttcttcgtggtcaccgtgtgagaagttgaagcggaatacgtttgcacctgcttcagctaatttagtaatagtctcaacatcgtttgaggctggccctaaagtactaacaattttagttttcttcatcttgaaaaaatctcctataatacaaaatcaaaaactacttggctaagtctttgtttaatgagtataacgcataattaccgtggtgttttgcatcaaacaaatcaagaatgtcatggtgagaaagcttgttgttctcaataccaacagctaagccgcccttaccttcaagtaacaacttaacagcataagctcccatttcacttgctaatacacgatcacgagttgttgggcttccgccacgttgcatgtgacctaagatattagcacgagcatcaaagtcgccatacttaagaagttcgtccttaaatttattagcgtccataacaccttctgctaaaacaacaattccatgcttcttgccattagcaaatccttgcttcaagttttcagcaatttccttaatgtcataaggctcttctgggataacaattgcatctgcgccagtagcaacaccaacgtgcattgcaatatctccacaatcacgacccataacatttacaacaaatacacgttggtgacttgttgcagtatcacgaattttatcaatggcttccattgcagtattacatgcagtgtcaaaaccaattgtgaaatcagtgtaaggaatatcattgtcaattgaaccaggaagaccaacagcattatagccatgtcttgtaagtttcaatgcaccatggtaagaaccgtcaccaccgatgacaactaaagcatcgattccatgcttctttaattgttcgattcccttaagttgaacttcttcttccttaaattctgggaaacgagctgagtaaagaaaggtaccaccgcggttaatcttgtccgcaactgtttcagaagtcatttggaaaatatcgccagcaactaaaccagcatatccgtaacgaattccgcaaacttcgataccgtttgccaaagctgtacgagtaacagctctaatggcagcgttcataccaggggcatctccaccactagttaaaataccaatccgtttcatgaattcacctctacgattttctgtgttttactcacatcggttttatcgtaccatttttttaactcattgtcttcaaaaataatcctatttttttcgttaataaagcctgctaaataaatgttttcgctttcaaccctatcagaatctattttactagaatttaaaagttttaaattaatctttaaaattaactttgcgagcatttgaaagtaaaaattgcgtcttagttggactaaaacgatcactttgtgtcttcacctgcaataaatatatatcgccaatctttaagttttcttctactttcttccatacttgaggaaaaattgtaaaatctttatcgccactactatcgctaaaaacggcaaaagccatattgtcaccctttttggtggtgatttgctttatcctcattaattttccgaccgcaattccctgctcgttactctcaaaagcttgcagccttttcgcgttatactttctagcatatttttgaacggcaatgattggattaataccagtactaaagcccattgcttccacttccattgcagatttttcagcagcagtcggcattttttcctcttcaatttttggctccaatgtttcgaataaagataagtttgaacctgccatttttacactttcaaccaagtctttatttattttcaaaagttcattgcgatttggagctagtcgatcaaaagcgcccgctttaattaaatttgcgatggcatcagcactcagtaaattattatcaatcttccacaaaaaatctgtcattgatttaattggccgtttaatttctagtatttgcttcagtaaatcacttcttaatccgcgaattgccttcaaaccgactaaaattttgccattttcaagtgaaaaatctgcctgactgttctcaatatccggtggcaaagtcttaagtccagcttcttgagcctgcatcaagtattgggcaatcttattacgattaccaatattactgtttaaaagagaaagataaaaagcacctggataatgaactttaaagtaggcaagccaaaaggcaattttactatatgcaactgcgtgcgaccggttaaaaccataattagcaaactgagcaatataatcataaacctgctctgctacttcttttcgtctgcccagtttaacggcgccttggatgaacttctccctttctttttgtattacatccgcatttttcttagacatggctcgtcttaacagatcggcttcacctaaagaaaaaccagctaagacttgagccgtctgcataacttgctcttgataaactaaaacaccgtaagttggtcctaagattttcttcaagctaggatcgggatattgtactctttccttaccatgttttctgttaatgaaatgtccaatattattcattggacctgggcgatacaaggcgtttacagcaacaatgtcttcaaaactatctggatgaagctgctctaaaacacgtttaatcccatcagattcaaactggaagacggcatctgtatcaccacgttgaaataaagcaagcgtttcttgatcatttaacggaatctgattaggatcaatttcaactccctctgattttaatgctgcaataatattgcccaaaatagttaagtttcttaagcctaaaaagtcaattttcaataatcctaaggactcgacgtttaatttcgtttgctgcgttactggtattcctaaagggcctgcctgtaagcccacgatctctgctaatgaatcatcggtaattactaaaccggctgcatgaattgaataatgacgtggtaaattttctaaatgctcagcagttgcaaacaaaattttgctaaaagtatttgtattaactaaaagctgtaattcttttgatttttgatatgcttctgctaaagtaatttttccttttgcatgcggaattgcatctaaccaacgatatgtttcaactttgtttagtccaaaaacacgacaaacatcttttaaaacttgcttagcagctaaagtaccaaaggttaaaatttgggcggcatgattcatcccatatttttcaaacatatacttgattacttcatcacgtcgattatctggaatatctaagtcaatatctggcatttgctgacgagcaggatttaagaaacgttcaaatagcaagttatattcaagcggatcaacttcagtaattcttaaagcatatgagacaagtgagccagcagccgagcctcgaccaggtccagttgtaatatggacactatgggcaaagttcatcacatcccacacaataagaaaataatcatcaaatcccatctcattgattacttttagttcataatctaatcttttttggtatctttccggaatctgtcccttaaatcttttagcaagaccattttgggccaatgaatgcaaatactcttttgatgttggaaatttattttgcttgaattttggtaactgtggatcttgaaatgtaatcttagcattgcaaagttgacctattttttcagcattttctaaagcatcttcgatttcaaattttcgataattaacctgtaactcttcgctagtctttaagtagtgcgaaccagcttgcttagctaactgctccacattttctaaatgggtgttacttttaatagcttgcaaagttcttcttaagaactgctcgttgcgattaagatattgtccatcttcgactgcagctaatgacagttcaaattgtgttgctaacgaacgaagataatttatatattcttgctgtccttgatctgcataaacacctaagtaaactaatgaagatgtaggaacagcatccttcagtatacgaacataattagcccccatattaggattattagtttgcagcatctttagttcactatgtaaattactaggcgtaattataactaaatgaccaagatatttttttaattcttcaagctctaaaacattttctttttcaccattttcggttaaaagattaactgcacttgataaacgtaagatatttttataaccttgatcatctttagctatgacaattaaatcatacttattcgcctgatcaatcaaaccattaattcttaactgcatccctaatagaggcttaattccagtttctttggctgctttataaaagttaactaagccataagtaatattcacatccgtcaaggcaagtgcagaataaccttttttctttgcgttttcagctaaatccttaactttagttggactctccaataatgtaaagctactaaggttttgcaaactaactgttcccatatgctcaccctttctaataatttaagtatagcaaattctctcttcttggcttgcgtaaagctcttatttttgctaagatacctagcgaaagaaggagaaattatgcgctatattattactatggtttggtcatgcattttttgcgaagttatcggttttatcgctgcatctttaactcagatgcaatttaatcctatgcaatctttgattattggcgcagtctttggcttgctattcgcaattattattcccgccattactgctaagagttacaaagacaagagtaagtacaataaactttaattgaattaaatttgaatattttaaaaagctgtttcataatgaaacagcttttttagtaccataattaataaaatttatagttcttagtagtatctactttgatatcaccatgagttaagtactcgctaaacatttgtacgtagtcctgatcaaagattttttcaatcttatccatactataagctggataaaatcctccgcctaaagcacgatagttgttaacggctaacttatataccttatcatcttcaagatctttgccatttaaggttactttagtcaatcgatgaccaactggtcttgaaagatcagcttcatattttactggatagaaaagatcaaaatgataaagcattggctttggcgtaatccaacgatcaataaacttaattttaccgtttttatctttttctaagaatccagctgagtattcaataatttcctttaattcttttccagtcaacttaacaatgcagagttgatttacatatggatagtttaataatacttctcgcatcgttacattctttgaaaaaccatgagcagattcagacataattgctgttgccgaaacatctgctccggtaaaccaaagttgcatttgctgaataagattgataaaaggtgctccctcaattcttcctttaatagcatcttcaattggcgctggttcagataagtgtgcaataggttgatctagccatttttgtgtttcttcatctagattcttaacgatcttttcaattgctggatctggtgcataatctttactatcaatcaattcagtagtcatattattgattttaactttaccattcgtatccttatcaaaatcaatgaccactttaccaactgcttctccgcgatagcctggctgaacaattgccgtatcacgcgtaactaagtttaggcgacgatgttggtgtccagttaaaaagacatcaatttccgggatctcagttaagattttataaccttcattttcgcctgtatgaggctcagttgcttctccagtcaatgggtcactttcaaagccaccatgatatagagcacaaagaatatctacttgtgggcgcaattttttagctaatttagaaagtacatcataaccagaaacaaactttaaacctttgatatgatcttctgattcccaatgagaaatatactgggtagtaattcccataattcctatttttagaccagctttttcaataatcgtatattcttttccaaagaaaggtacatttgttgctgcgtctaaaatattatcattgataaatggagcacgattgttatcaacgtagtaggataaataatctaaaccataattaaagtcatgattgcctaatgcacgtgcatcatatccaacttcattataagcttcagtaaatttacgcaatccttcatcttcaggcaacttttgagtgtagctagctaaaggagagccttgcaaacaatctccactatcagtaactaagacattttcagcaccgtatttttctttttcacttttaaccacgctacttacgcgactaagagaaattggagcatcgtagttgtctttattttgataatcagttggcattaaaaagccatgcgtatcacttgaatgtaaaataactaatttcattaatacctattcctttaatcaaaaattacataaaaaaagacaccccaaggtgtctttaattaatcgttattttgttgcttgttttcgttagcaacttgacggcctttgtaaaagccctttggtgaaacgcggtggcttaaacggtattcaccagtagtagcatcgtaatgcattgctggtgtggctaatttaatatgaccacgacgtgaacgtttcttttgcttagaagtttttcttgcaggaactgccattagttagatctccttttttatagaattgagacttgcgaacctttgaataaacaaattcactaaatactcacgtatttcaataatacaatctaagagctgataaatcaagtccaatcttattttgtagcttcagaattgttaactttctttaattcagcaatctgcttatctttagattcaatttcactccgatatttattatctaattctttcttctgttttgctagtgctttttttacatctggagaaactttttctcctcttccaattaaaagtgaaactaaagctcccagtaaaagcataataactaagacaattattaaaggcattttaggttggaaaaagccaaaattgattgctactggttcagtatttaaacaggcgaaaattacaagcactaaaacgattattagtccaattactaaatttctttgcttattcattatttttccctactttctactagcaaatttcaaacttgcccaatcaccaatgcgtgggaaaatctgataaagttttgctaaagtagctagacttaatggtaaattcaattcacgacgattagaaccaaagaaatgaaccacttgccaagctacatcatcaggatcaagcataaaacgttgtacattatttacataagatccactttcgtctgcggtattaaagaaattcgtataaactggtccaggatttactgtcatcaccttaacaccgaatggctttaattctaaacgtaaaacatttgaaaattgaataatagctgccttagttgcactatatgctgcagttttagtagtaggtacaattccagcaattgagccaaagttgataatttgaccatttttttgatcaatcattacccgtgcaacaagacgggtaaagtacattaaacctaagacattagtttggaacatttcagtcactacctgaggtgaagtttctaaaaattctttaaagacgccaaaaccagctgcattaacgagataatcaatgtggttaacatgactaataatttcattaaaggcacggtcgatttgatcagctttactaatatcagttggaaatacaaatacttcgtttcctgaaagttgacgagcttcattggcaatttcttctaatttatcttgatgacgagccattaaaatgatagttgctcctcggctagcactctctaacgcaatcgagcgaccaataccacttgaagctccagtaactactacgactttatcccttaacgaattactcatattattatcccctcaatgtaatttcaaaactatctaaatcattagctaaacgagtatgcttaaagatctttctcgcttcatgttctaattctttacctgcttttcccgtgtagcgcgcagaaatatgggtcaaataaagctttcgtacatgacgatctcttgctatacgagcagcatctaagcaagttgaatggaaatagcgatgcgccatcttttcttcatcaccattaaaagtagattcatgaactaaaacatctgcatgatcagctagcttaccaatgttttctgttggacgtgtatcatagataattgtaacaactcgtcctggacgctctttgccaaggaaatctcgcccatctaatttttgaccatcgcttaatgtaattgtcttcccggcttttaattgaccaagaagtggcccatttggcacattatattctgcaaccttatccatcaataattcaccaggacgtggcttttcaaccacacgaaagccaaaacttggtacgcggtgatctaaacgggcagtataaacggcgaaaagattgttttcaaaaattaaaccgtcttctttcaaaacaacgtatttaattggatatgatacgcgagttcttgaaactttcaaagaagtttgcacaaattgttcaattccagcaggtccataaattgtcaatggaccaccgtcgccttgaaaggaacgagatgaaagaaaacctggcaaaccaaaaatatgatcgccatgagtatgcgaaataaaaattcgcgttacctttctaggtctaatgttagtttttaaaatttgatgctgtgtagcttcacctacatcaaataaccatacttcatttaattcatctaataatttaagtgcggtacaagaaacgtttctgctttttgacggctgcccagcacttgttcctaaaaattgtatttccatgaaaaccctatttctaatactttccttttgtaactaacattttagttacataagcactataatattttgatcctgctgtagttgggtgcgtatgatcatcatagaaccaatcttgatgactcccggcaaactcatgccatttgataatggttaggttaggatattttttagccgctgcatccaattcactattaacttgatcttgccaatcacgtgttggaacatgcgtattaatccaaaaaacatgccgctttggtccaataatttgcattaaacgatcaagttctttaggagcaaaagcaccatttattcctaaaccgatcaatacattattgtttaaagcacctttattcttgtactgttcaaaaagaggaattgtgtcacccaattgtctagaaacagctgcatcaacaatcaaatgcggcattaacttttgcaaattttgactagagcctgccatcacggaatccccaattgcagttacttggattttttgcgctaattgcaagtcaacttgagaaatgccatatttttcaaaatccttatttacgggtttggttgctgctgctttcttagcttgctttaggatttttgattttgaagttgctgattttttctttttagattgtgcttctttaattaactttttattcttcttaagttgtttatttcggttcgatttaatttgagttgctagttctgaatgattgggattttcggcctttacagttggtgccttaagaattccaaaactacctaaaataaagacaactattccagtcgcaaataatgcttttgattgataatggttagcttgaaaatttaaggcttttgataaaaattgacgtagtttttcccaatcaatccgtccaaatggtttttcaataaaacgataacttaattctgcaattattaaaattaaaacaacttcgattaaatggtacaaaattacatggtctgcaatatctttgaccttatcttcgaagaaaatcatcactgggaactgatataaataaattccgtatgaccgggacccaatccagctaaatacaggattagtcagccatttattccaactactaccaggatgagcaattacgcctacaaaaatcattgttactaaggagaataaaaacatcccgccacggtaagcaaaagctttttgcgggttaaagattggactagtagccatcaataaaataccgactagggctacactcccaattatatttaagagtcgtctatctcccttttcaaggttggcatttaacttccatgttggccaaaatactgctaacattgcacccaagcctaatgaaaagaatctcgtatctgttccatagtaaattctacttgtatcaacacctggcttaaataaaaaggccatctctaaagcagaaaatacagttaagactgtaataatccaaaaaattatctttttctttttggctaatttaactaatagaaaaattaccagaggccaaataatataaaactgtccttcaattgacattgtccataaatgaacgcatggagattcattggaggcaaaacgttcaaaataactctgaccattctttatttgccaaaaattataaacatttaagaggttagcaactactatctgatttaacttagctaaaagattttgctgaaaaagtaagatataggcactacatccccataacagagcaatcatttgggggtataatttcttgattcgtcttatataaaaagatttaaagtcatattttccccgctcttcataggcatgaaacatatggtctgtaactaaatatccagacagtactagaaatatcggcacacccaaatatccacccataaatcgatttggattaaggtgatatagaattactccaataacagctaaagcacgaagtccggcatagcctgtaataaagcggttctttcttttcaaaagtcttactcccaacttttaatttttattaatctacaaactcaaaagtaaagtcagctattgatacatcgtcgccgtttactgctcccttttctcttaaagcatcatctacacccatccgctttaatttacgagctagaagcataattccatcagtatgatccagattcgttctttgaacaagacgctctaacttattgccagtaacaataaagctatgctcgccagttcgctcaaccttaaatccatcatcttcaggctttttataaacatattctttttcggcaactttaatttctgctggtttttcagcttcttcttttgcaacttcttcaacaagatctgctgtcttacccattagttcgctgacaccctgatgggtaacactagaaataggatatacagtcttatctcctaatttcttcttaaattcagctagtttttcttcgcttccaggaatatccatttgcgttgctacaataagttctttcttacttgttaaatccttagtgtagcctgctaattccttgcgaattgtttcataatcttcataggcatctctaccattatttggatccattgaaactaagtgtaaaattacctttgtacgttcaacgtggcgcaaaaattgaattccaaggcctacccccttagatgcaccttcaattaatccgggcaagtccgccattgaaaagtcgcggccatccggcagaacaaccattcctaagtttggcgtcaaagtagtaaattcataagctgcaatctttggctttgctttagttacaacagacaaaagcgttgatttcccaactgatggaaaccctactagtcctacatctgctaatacctttaattctaagcgtaaggtacgaaattctcctggttcaccattttcagcaatttctggagctgttctagttggagtagcaaagtgaatattacctctgccgcccttaccgccacgagctactacaagctcttgaccatttttaaccaagtcacctaaaagttcaccagtattaaagtcatagacacttgttcccattggaacctttaagcggacatctttagctccgcgaccatattgagatttgatgcgaccattttcaccattatcagccttaaacttacgtctaaagcgaaaatccattaaagttctcaaaccggaatcagcaactaaaataatactgccgcctcggccaccgtctccaccagctggaccgccaagtggaacatatttttcatgacgaaaagcaactgcaccatcgccgccttttcctgcttgtacatctatttttgtttggtcgacaaacattaagtatgcctccttttatatatcaagttataattaaaaaaattcttaaagtttcttaactatgataccatatcaagccctattaaatcaggtcttttatcgttattttacaaactcaatttaacagtttgtgcttgcggaagagttaaacccgcatctcgtaattcttcaattgaagcttctttaattttctttaaagatccaaacttgcgcaaaagcttatttctagatttcggaccaatccctttaatttcatctaatttgcttgaaagagcatttttagcatgagttcttctatgaaaagtaattgcaaatcggtgaacttcatcctgaattcttgtcattaagtaaaaaccttctgattttggatttaaaggaatgagttttaattcttctccttgagtaggatcaccaaaaatcaagtgattggtgcggtgatggtcatctttaaccatccctgctactggaatattgacgtttaattcatttctcaaaacatctaagcaagcatctacttgaatttgaccaccatccattaaaattaagtcaggcattttcttgtgctctttcagaagacgactatagcgtcttctaaccacttcgcgtgtatttcctacttcgtcagccgcattttggtgttctacttcaccttttaatttatacttccgatattcatgtttatctggttcgccatcagtaaatacaactaaggcagaaacagggtcagcaccttgaatatgagagtggtcaaaactttcaattcgatggccatatggcaaacccaaagcatcaaaaatctctttttgtgcacccttggtcttgcggttacctaattctaacaagcggaatttttcatctagttttagcttagcgttgtcatgtgccatctctaataaagcccgtttttgacctctttgcggagttcttaccgctacgcctaaaacttcagctaaagcctcattatcaattccagctggaactaagacttcctttggtaaaacacgatttctttgaccatagaattgcgcaataaacgatacaaacgcatcctgcggttcattagtatctgttagtggaaacaatctagtttcccgccgtaataacttggcttgtcttaagaaaaatacttgaatcgaaatccatgacttatcaacgtaaaagttaaaaatatctctctgagtatggtcattagaaataattttttgcttttcaacggtttgttcaatatattttaactgatccctaaattcagccgcccgctcaaactccaaattcattgaagcctgagtcattttttcagttaaatcttgtttaacttgagaaatatcaccgtttaaaaaacgctttatttttctaatttgcttatcataagcactctttggcacctctttaaagcatgcgccgaggcactgtcccatatgatagtaaagacatgggcgtccctgatgacctgaacatcttcttagcggccaaaccttttgaataaattttaaagttgcttgggctgcataaacatttggataagggccaaaatagtagccatgatctttatgaacaaatgaagttaaacgtgtttgcggatctctttcgttagtaatttcaatatatggataacccgtaccttgttttagttgaacgttatagtatggttgatattttttaattaaagtaatttctagtaaaaaagattctttgtcagaagaaactgtaataatatcaaaatcacgaatttcacgaacaagttcagcacgccgaccaacttgtttactcttaaaataggaacgaacgcggttcttcaaattcttagactttcccacataaatcacgttgccgtttatatctttcattaaatagcaacctggtttgtccggtagaagctttaatttattttcaatgtgttccgttgccattaattatttttccttcctattaaaattcccatagtattttatcacgttccttcttaaaaccaagtaagatgtcttttttatttaccttctaccctatctttttataaaataattaagtaaacaaaaagaaaggtcgcaaataaatgaaaaatatttattttaatcatgatggaaacatcgatgatttggtctcacttcttttactattgcaagcacctgatatcaaactaattggaatcagcgcaattgatggtgatggatatatcgatccagcagtagaagcttgtcgaaaaatggtcgataaatttaacttacgcggtgataagttagaagtagctcgctcaaattcacgtgcaattcatcaatttccaaaagagtggcgcatggcaacttattcctttaattacttccctattttgaatgaaagcggagaaattaaaacacctgaagctccacttcctgcccatttagatatgattgataaaattaaaaaggcagatggtccagttactctaatcatgaccggaccaattactgacctggcaagagctttagatgaagatgcttctattcagtcaaaaatcgaaaaagtttactggatgggtggttcattagatgggcacggcaatgtagtgagtgttgatgcagacgaaacgcaagaatggaatgctttctgggatccagaggctgtaagacgtgttctagattcagacctcgacattcaaatggtaggtcttgaaagtactgaagaattgccattaaccgatgaacttcgacagcactgggctagtttaagaaaatatccagctattgatttagttggcttaggatacagtctaattatctctgtacctaatgcagaactatacttgtgggacgttttaacaactatgtctgcattatatcctgaactcgttgaaactcgtcagattaaagccaatgtaattacttcaggcttagcaagcggacgaatgttcattgatcctaatggaaaagaaattactgaagtgacaaaagcagataaagattcattctttgaaaaaatagacaaaattttagaaagacaataaatatatagatgacaacttggttaacacaatttatcgaaagctttggctacattgccattattcttttaattgccgtagaaaatattttccctccaattccctctgaggtaattttgacactgggaggtttcttagttagtggaacaaaattaactctaattggagttatcctcgcctctactttaggttcagttatcggagccataattttattctcaattagccggaatctaaccttaccgcgattagagaaactacttgaaactaaactatttaaacttttaggtttcaaaaaagatgatgcacaaaaggcgatcgactggttcgacaaacacggaattggcgcaattttttatggtcgctgtattccagtcgttagaagtttgatttctatccccgcaggtatcgctcatgttggctggactaaatttttagttttaactactttaggaagtttagtttggaacagtgttttggttggcttaggacattatatggggaaaaattggcaagtcgtggttagaatcttcgatgactacacgctcgtaattattgcccttttattaattttatttatttacttcggaattaaatggtataagactcgaattaagaagtagatttttactgtagatcaatacacaaaaagaacggtcatgaccgttctttttaagttttattaactttaaattttaataccaagcgggcttgtctccgtcagtacctgctttatctaatccaacatttgccttaacatccttggttggattttcaattaaatcagcaatatagtcagctacacttaaacgtgatacctctgttcccttaaatggagttttggcaccaacagtcttttcataactaatttcatctttattagttaaccaagctggtctaataattgtgtaatctagatcacttgccgtaatctgatcagcagctgcccgataagtcgttaaatatgagcccaaaatatttttattccattctccaaattttccagggacttcattataaattcctaaggacgaaatccagatcaaacgtttaatattatttgcgtccattgctttaacaacagtttttgcttgctcttcaatatttgccccagctaaatttgcataaacgagatcaacatccgttaaagcttctttcagctcattaaaattacttgcgtctcccttaattaccttttctctagcttcattaatttgctttaacttatttgggtgacgtagatataaaatcatatcaatgttgtctttctttaatagcattggttcaactaattgagcaatttgaccagcagcacctaaaatagcaatttttgtcatttttttcctcacattataaaaagcataatttcactctaataaaaacttcccaaattattatttagctaatgtgcaaatttgaataatttcagtcataattttctccttacctagctatctcttacttacaatttaatagtaatacttattattaataagtcaactgtgtgatgttgattttattagcttttcttcaaatttcgtatagatttacttttttaaagcattacaatagataaaggagaacgttactagatagagaggtaaaaacatgactaataataattctgtacctaagaaactctcctttatatcaatatatttcttaggtattaatgcggtcattggatcaggaacgttcctgctaccttctgtaatttatcgttacatgaacttaacagcaattcttgttcttctatgtactgctgtcactgtcagcatgattgctttgtgctatgctgacttatcgagccgttttacacaatcaggagcagcatggctttattcttataatgcttttggtcgctttgctggttatgagctcggcattttcacttggtttttaggttgcacaactctttcagctgaagtagtagctttgcttactgtcctcaagagttttctaccgatttttaaaaataatgctgtctatattggtagtattattttcttaattttattgttttcagttattaatttcttcggtagatcttgggtaaaaattgtcaataatatttcagcagccgcaaagataattactttaatcgtctttattatcgtcggagctttctttattaaaaaagcaaacttcactcccgtaattccacatgcggcactaactggtgttacaccatttttcaaacattttggcgatgcatttacaccaatcttttatttgtttactggcttttcatttattccaatcgctgcaaaacaaatgaacaatcctgaaaagaatattcctcgagttttgattgccgtaatgactagtgtcacaattcttgattgcttaatgcttttagtagcaattggcttgagtggtcaaaaattaggatcctattctaatcctctagctagtgccttaaaaactggcgttggtcaatggggctttgcctttatgatcattggcatgctaatttcaatttttggcgttgcctttagtgcttcatttaatactccatcattaattgcttctcttgctaatgaacatggaatgttgccaaaatggattggaaagaaaaacaagcatgatgcaccttgggtaggtattattttcacagcaattttatctgctgcattggctactcaaagctacctcttccttgtttcatgtacagttttagcatcatttgttcagtatgtgccatcaattttagccgttatcaagtttaaacacagtaatgaatatccaactcatggcttttctcttcctggaaaatatactgttccaattattgctttaattatttcttgctacatggtaactaattttacgcctaagacattgcttttaggcgcggtagttgctgtacttgctgctgcatgttatttctttattgataaagatgaaaaactagaaaaagagcatgacgacttcttagctaagctaagacatataaaataaaaatttggataaattaaagagcttacgattttaagtcgtaagctctttttttattctctataataattttaaagtctattctttatttttttgccaaagatagcaactgcactaattgctgctactagtaacccaccaattactactaacgggttaacagcctttccttcagtttctggcaattgcgtagcaactgaaacaggattagaagtttttttactatttttcttattatctttagaattgtttactacgctgacattcttttcagttaccgtagtagaaccaagatctttgactactacatctttattcgctttttcatcactactcttgtttgtattaactttagcagtagatttttctacatcttcttttaaactgctactttgcttacttgcatcagatgaagatattgaagttgaagagctactttttacattagacttatttgttttagaatcttgtgctgcagtatctttaacagttacataaactgcaagtcttgatcttgatccgtcaggaaaagtcacataaacagttcctaccttgttaatttcaggagtttgatcccaatttgcaactgtacctgctggaactgtattccaattagaaataccacttgttgcatctggtaaaacacctttggtagtggtcaaagttttgactgataaaggattagtataagcttgtaagtttttatgttgctcaagctgagtctgataagtcttggcttgctcagcacctgcatttgcactatcagtagttgctgcaaaagcagtaccgttcaaacttaaagaagcaagcaacgctgctgctcctaaccccgtcattatgtttcttttattaatttgtctcatcataattcacgctcctcagcaaggtaagctatactttaacttgctgttctatttacttttattatacagcagttttacaaaaatattacaaattaatagattttttacattctttgtaatattttaagaaatcgctacttttaccgctttcattatctttatatcatatctacttttaaaacccaaaagtttacgcttgaaattacgatgaactattttcttagctagctagataagttaaagcaacttgcaattgagtaaagtcacttaaagtctgtgcaatattttcttgagctacaatttgataaatttctgaagtatcttcatcaaattcaaagccagcaccaatcacaatatcagcagcttcttcaagtaaatcaaaattttcttgagctggatctaatttgaataatgttccgccatcatcagtaattcgatagccatctttttctttttcaatccagcagtacactaaatcaccataggcaccaattagcggcgtcacaacttcaatgtcctctccagcttgaataaattgaatattttgttttaaccagtcaagtgaagcttgctcaattaattttaattcagaatttttcatttttatcactcccctattttcaacaaattataacctaaaatggtaaaaaaaaagaagcctgattatagtgactcctttagtatcctatctgttaagctgagcaaactgaactactcgattcaataattgagtaaagttattaacttcacttctcaaatcgcgactatcgatataatcacgagttaactcaccacgatcatcaagcaaaacgccaaattcactagccaaacgtgcaacatcagtcgcaatacttgaaaaactcccaatattatcatcaatcattctagcggtgaaaacacgatcatttaaagcataagttccattaggatacacaatcaaattaaagtggatcatatcatttaatccatcaacaacattagtagaaacccggtactcattatcgtcgacaggttcaatagaaaatgcagaactgatgccattatcatctctaaaagattttatcatcacatcttcaagatcatacataagattgacctccaacatctttatttaacaaactaattaactacactttctattatatcttttctctccccaaatttgtgagactgtaaaatagtttgtgtaaggatgaataattccttaaatttatttcttaaaacattagaaaaaggagttcctttctcgtatgattggtttgaacaaaaaaacacatacagaaagaagaactccttcatgaatgattttaccaaaaatatagcacaagctctattcaatcaagacaaaataaacgatttattgcgcaaagaactccagcaagcagttaatgacctattagaggctgaactgactgcgtttttaggctatgatccttatgccagagctggctggaatacaggcaattcacgcaatggtgcttactttcgcaaggttgatacgcaatttggcgagattaaaattcaggtgcctagggatcgtaacggcatgtttcatcagcacacgctccctgactacaagcagcactccaatgtcttggaaagcatgattatcaagctatattccaaaggcgtaaccactagagaaatagccgacttgattgaaaagatgtatggcagtcattacagcccagctcaggtatctaacatctccaagcagatgattccaaaagtcgaggcctatcatcagcgcaaattcagtgacaagttcttctgcgtttatttggacgctacctacattcctttgcgtcgcataacctttgatcgtgaagcagtttatattgccattggcatcaagcctaatggtcacaaggaagtcatcgattaccgcattgctcccagcgaaaacgtcgagaattggacggaaatgcttcaagacatgaagtctcgcggtctagaacaggttgagctctttctttcagatggcgttgtgggcatgaagacagtgctggagcagacttatccgaaagctcattttcaacgctgtctagttcatgtcatgcgcaatatttgcgctaaagtacgcgtagatgatcgcgaaacgatcatgaatgaattcaagcaaattcatcaacagccaaataaggaagccgcgatcaaagtcttgcacgccttctatgacaagtggaacagcgcgtacaaccatgtcatcagaaatctcaaagagattgaacctgatctgctagtcttttacagctatcctaagcagatcagggcttcaatttactctaccaatatgatcgaatcctttaacaacgttatcaagcgtaaagctaagcctaaagcagagtttccaactgaacagtcgcttaatacttttattggcattcaggcaatgagctacaacgaacgctatttcaatcgaatccacaaaggctttggtcaggttcaggataccttagaatcctactttgattaaataaaagattaaaaaatcaatctacgagaaaaatctatttacacaaaaaatttgacagtttcaaatttgttctttaagcttttaaatttgaaaaaaatatattattttcatataaagttaaaatcgcttaattttgctatcttatatcactaattttggttataataaaaggagttttaagtggaggaatttaatttgaaaaagttaattgttggtgctttaagttgtggtcttttgttacttgccggttgccgtaataacttagtggaacctaaacataagtcttccgcagaggattatgcaatcattcaatcttcttctcataaaaagtcacataagaaagtggaacaacctaaaaagaagaacgaagacaaaaagaaaaaagataagtcaaaagatgaaaataaaaagatggatgatcaaattgacacccttgataaaaatgaaactaactcaagctcagaagctcaaagttccagttcagctcttccatctttaaataattctaagcgtgaaagcagtactgaaaccaatagaagtttaaaatcgaattttggtactgctttatacactattcctcgtcaaaattatagctactatactccaaaaagtaactactattacagtaataattggtcaactaataataatactgattcaagccatcaaagttcagctgtaagtagctcaaaatcagaaccaagtacatcaacttccagttcttcatctagtgatacttcaacttcaaccgaagaaaaacaatcaacaactactcaaaataatgattctaattcaaacgaatcaagtgaagacgttcaaaatgattaatattaaaaggcactcgattgagtgtcttttttagtaggtttgatctatttttccgtctaatagatgttcacttaaatttttatcaaagaaaactgggagatcatgatcaaaattataggctaattttttacttatcaattcttccttcgtcatccaggtcaattttccctcatcagaagcctttactgttccagtaaagtcagtagctatataaaagaagactaaatatcgttcatcatttttatcaaagaattgttttactccaactaaatgcggatctttaataaagagacctgtttcttctttgatttctctaactacggaatcatgaaaagactcatgcggttcaacgtgaccaccaggaaaagttaaaccaggccaaacaggatcatttcgatcaagaactaaaattttatcttttttcttaatcatacacatgttagttaaagttacgggctcagaacgtttcatcatttagggtttcactttctataataatgaaattttattttactactatcgattcatttttctaaatacttatttattagtataattaatatacatagattagagttttagaaggaaattaaaaatgactttgcaaattaatacccgtgttgattctatcacatggccactaaatcaaaacttaactaaccaagagataatttctcaattagagttaactgtaactgaaaatggacagctcatttcaaatgacaatttaagtattaataaaaaggctgttaaccgttcagaagcaggcgtttatccgataatcatcactgcaatcggttctaataatgaatatgcaactaagaaaattcaagcctgggtcactgataagaataatgtaagtagcaacgatagacccccggtccgtccaactcctgctccacaatataagacaccagctcaaacacctagtccaaaaaagaaaagtaagaaaaaaggtgtctatattgtacttggcgttcttgtattactaattgcaattatttttgggatttctgcttgccaagcacataatgacactgttcaaaatgagcaagctcaaagtaatgcgctcaataatacaaatagcaaactagataatttatctgagcaaaataagcaactaatgcaacaaaataaagagttgcagaatgctatcaataattataaacaggatcaaaataaggaagaattacagaatcaattagatcaaatcaagaatgaaaatcagcaattgaaaaataatgcagctaataatcaagctttacaaaatcaaattgatcaattaggttctacaattgatcagatcaagcaaaatccaaatcaagctgattctttgttgaatcaaatgaaaaataatcaaaatgaatttatgcaaaatttgaatgcaactttccaaaagttagttagcgattttcagcaattgattggtaaatagatattttaaaaaggatgtttctggtgcatggaaacatcctttttttgatggatctacgtggtgtggagaataaacaacagtaccgttaatcaatgttttttcactaggatcatctccacatacgtggagaatactaaacaaatcccgtcattacaacaatcttcaagtttaatattatcatttttatttagtttcagccaatcaaaaaagagtaaggactatctctcaaaaataatccttactctttttgattaaactagtttttattcatcccaagttgaattcttatcagcgtcttcttgagcttccttttcaaggcgtgcttcaatttctttaacgctgtcttcatacttgtcttctactttgataccaatatcatctaattgttgatcagcaaccggtgctggagcatgcatcattggttctgaagcagatgcattctttggaaaggcagttacgtcacgaatgttgtccttttgagctaacatcatagcaaatctgtctaatccgattgcaagaccagcatgtggtgggaatcccatatctaaagcatcaagtaagtacccaaattgttcataagcacgcttcttagtaaagccaagtgccttaaacatcttttcttgaattgaacgtttgtgaatacggattgatccgccacccatttcatccccattcataacaatatcgtatgaacgtgcatgagccttgtgtggatcagtatcaagcaacttaattccttcatcatctggcatagtaaatgggtggtgagcagcaatccagcgacctagaccttcatcatattcaaatagtggccagtcaacaacccaaacaaagtcgtaaacattttctggaataattccagtttccttcgcaaattcacgacgtaaatggtctagagaatcagttacaaccttccacttatcagcaacaaatactactaattcgccgccttcaaggtcaaattccttcttcaaagcttctttattttcatcagttaagaaacgagaaacaggtcctgagaactcgccatcttcatatttaacccatgccaatcccttagcgtggtaacgcttgatgtaatcttgtttttcttcaatcttcttacgtgaatattgcttagcaccattcttaacagcaattccctttacgtaaccgccgtcagcaattgcaccagagaagaccttgaagtcagaatccttaaagattgggcttaagtcatgaataaacatttcgtagcgagtatctggcttatcagaaccatacttgttcattgcttcatcccaagtaatacgcttgattggcgtcttcaagtcaattcccattacatctttcatgatcttcttcaaaagaccttcagtatagtcttgaacttgtttttcatcagtgaatgatgtttccatatcaatttgcgtaaattcaggttgacgatcaccacgcaaatcttcgtcacggaagcaacgtgctaattggtaatacttatcaaaaccagcacccattaataattgcttaaataattgtggtgattgaggaagtgcataaaagctacctgggtaaattcttgatggaacaaggtagtcacgcgcaccttctggagaagacttacctaagattggagtttcaatatcaataaagccattttcatcaaaatattcgtgagttgcctttaaaatctttgaacgaagcataattgctttttgtaaagttgggcgacgtaaatcaaggtagcgatacttcaatctagtttgctcggctgcattgatatcatctttgatttcaaaaggtggtacctttgacttatttaaaacatcaatttcagttgcgtcaacttcaacttcaccagtcttcatgtctgggtttacgctagaacgcttaacaaccttacccttaacttcaattacgtcttcattgttaagagaatcggcaatatccattaattctttaccagaatctttattaacaacaacttgaacaataccttcacgatcacggaggtcgataaataccaagttacctaaattacgtacgcgttgtacccaaccataaaggtttacttcttgtccttcgtattcgctagttatattaccagcataatcagttcttttttccatcttcatcataattcttaatcctctatcttttccattacagatttcatgtcatttagatcttctaaacttaaatctaaagttttaccatcagctaaacgcttaatgttaagcacaccattttcaagctctttagcacccaacgtaattacaaatttcgcatgcacacgatctgcttttctaaattgttgctttaatttcttttgatcaacatcatattgagctttaaagtcttgcttgcgaagagaacgtgcaatttcaacggctttcatttctgtgccttcaccaatattagtgataaagaaatcaatgccttcatcttcaaataatgctggattttgttccttaagaacaagcattaatctttcttcaccaataccaaaaccaacagctggagtttctggaccatcaaattcttcaactaagtgattatagcgtccaccacccaaaattgtggttgctgattcccataagtttttatcttcaaccataaattcaaagattacaccggtgtagtaatcaagaccacgaactaaatcatcatctaatacataattaatgcccaattgttcaagcatatcagtaatagtttcaaaatttttcttagaatcttcatctaggtaatcaacgattcttggagcatcaggtaaaaattgcttgtcttcctccgccttagagtcaagaatccgaagtggattcatagacaaacgtctttgggagtcttctgaaagctgatctttaagcggtgtaaagtaatttactaatgcatcgtgataatctttacgcacttgtgcattacctaaagtattaatgtgcaattcataattcttaacgcctaactcagctaataaatcgtgtcccatcataatcgtctcaacatcagcaagaggactatttgagccaaaactttcaacaccaatttgatgaaattcacgttgacgacctgcttgaggtctttcatatctaaaagtgttgtcaatatagtaaacattaaatggctttactacatcaggaccatataatttattttcaacatatgctctaactacaccagcagttccttcaggacgaagtgcaatgtgacgaccacctttgtcgttaaaggcatacatttccttttctacaacatctgaactttcaccagatgaacgagaaaagacttcataattttcaaaacttggtgtccgaatttcacgataatttgcacgtttgaagaaatttctcgcgattgtttcaactttttcccatgaaccagattctgctggcaaaatatcgactgtaccttttggtctttgaactttcatttaatcatcctttaatatattaataaaaaaagcgcccttgaacttagtcaagggcgcagtaaactagcacggtaccaccttttgcttgctgcgattaacgctcgcgaaacgaaccattatctgttaaaggtgtcacagatcgcaaactatccgctctctcaccaaatgagcggtctctgaaatagatcatgctaatctacattctttgtcatcgataattcctttttagcttatatttttcagtcggtaaagtcaacctttgtaagcctttacttaaagaattaaatatcaagaacaattgtaaatggaccatcattctcaaggctaacctgcatatcagctccaaattcaccagtttcaacatgaaagtctttattttctaattcttggttaaaatcttcccaaagttcttttgacttaggaggtcgcattgcctctacaaaactcggacgattaccctttttagtattagctagcaaagtaaattgactaacacttaaaatttctccgttaacatcttttaaagataagttagttttaccattttcatcttcaaaaatacgcattttagcaattttactagctgcctttttgacctgatctagctcatcgccttcacgtaatccaactaatagaagaaagccacgtttaattttacctacaacttcattatcaatggtaacctgagctttatttactctttgaataacaacacgcattaattaattgacctctttgcttcataaacatttggcacatcacgcatccggctcaaaatatcttccaggtgtgctgcatctctaactgacacagtagcataaatatgtgccatattattactgtctacttttccagaaatattaacaatattcttggtctttgagtttaaagcattgattacatcacttaaaagacgcgaacgattgaaaccatagatctcaatatctgcattgtagttttctttgtctttatctttagcaatgttctcccaagctacatcaattaatcgaccttgcttcttagcttcttcagtaatgttaggacaatcagcacggtgaattgttaccccgcgtcccttagttacgtagccaataatcggatctcctgggactggattacagcatttagctaagtgaagcattaagtcagaaacaccctgaaccattacgccattattatgcttaacacgcataatatcagctggcgcatcagaattatcatcttcttcagttgaactttgctggccagcattcataatcttttcttcaagttgccgttgcttttcatcttcagccttcttgcgcaggtcttcagttaatcgattagcaacagtagctgcggaaatttctccgtaacccacggctgcaaataattcttcttcattatggtaattgaaatgattaattaccttctgaatatgttccttgtccataaactctttgggagctaaatcgcggttaagaagttcctgctcaataaaattttgacccttttcgatattttcttcacggtcttctgctttaaagaaacgcttgatcttatttcttgctcttgaagttttaaccaatttaacccaatcacgggaaggacgagctgaagtttgagtaagcatttcaactacgtcaccatttttaagtttatagtctagtggaacaatcttgccattaattctagcaccaactgaatgcgcaccaacttctgagtgaaccatgtacgcaaaatctaatggtactgaaccttttggaagttcataaacgtcacctttaggagtaaagacataaacacgatctgaaaagatatcagtcttaacactcttcatgaactcatgcgagtctttagtttcattttgaagttcaagaatttcttggaacatgttaagcttcttgtttgcatcggtttgctcaacttcgcccttaacgccttctttatatgcccagtgtgcagcaacaccgtattcagcaacttgatgcattgcttcagttctaatctgaatttcaagtggtttgccgccaggcccaataatcgtcgtatgtaaagattggtaaccgttaacctttggaacagcaatatagtctttaaaacgaccaggcattggcttccacttggtatgaacagcacctaaaacggcgtaacaatcacgaacagacttcacaattacacgaactgctaataaatcatagatttcgctaaagtctttgtgcttattaaccatcttcttatagatagaataaatatgcttagggcgtccataaatttcatattcaattcctaagctatcaagcgtttgcttcaaggttttaattgcatcagcaatgtatccttcccgctcactacgcttagactgcattaagttaacaattcggtagtattgctgaggattcaaatagtgcaaactcatatcttcgagttcccacttaatagttccgatacctaaacggtctgcaagtggtgcgtaaatgtctaacgtttcatcagcaatccttctctgcttgtcaggacgtaaatggtctaaagtatgcatattgtgtaagcggtcagcaagcttaaccatgattacacgtaagtctttagccatcgcaattagcatcttacggtgattatctgctagatattcttcgtggctcttcgacttatattgaatcttacttaactttgttacaccatcaacaataaaggcgacatcttttccaaatttttccttgatatcatcattagttaccggcgtatcctctacagtatcatgaagataaccagctgctactgtatcaggatctagtcgtaaagtagccaaagttcccgcaacttgagttgggtgaattatatatggttgtccagaaactctaaactgaccttcatgagcattcttagcaaattcatatgctgattcaacaaaagctaagtgttcatcattcatatatttcttgcattctgcaagaacttcttcatgagtcatctcacgatattttgacataaagcatcacctattctttatttcttttctttgtaaaaatcatcatgccagaggccaaacaactcaaagcttaaatatactaggcaaagaagaaaattgtatttagcaaaatgaattaaaacagcaattgcaaacactactggaaataaaagcaaccaccaatagcttaattttctaatttgcataatccggccaatttggtaacttaaataactattaaaaataaagaatactaatccaattcgccatacacgacttaaatgaactaatggacaaataatccaaacaattactcctaataaagttaaccaaacgagtggcataaatgatttttcatttattttactccaccaagccttaaaattaaaatttttcttttcttcactatttttcttcattttttgcttaccttttcttttaatatatatttttaatctggttttctagcaattaatagaccaatccagcgtccttcttgcattttcattttaatttcaaaattattttctgcaagagctttttcaactttaggtagctgtaaatagtcaattccagagaaaataacctttccttctttatttaagtgactatctaagtctggaattaattctaacaaaatatcagctaaaatattggctacaatcaaatcatatttatcatcaatgtcttttagtaagttagccttgcgcacattaatattatttacatcatttagcgcaatattttcttttgcagctgtaactgcctcgtcagaaatatcagttcctaaaacatgacttgcccctaatttactggcagcaatagctagaatacctgatccagtcccaatatccaaaactgacattggtttaactaaagcacgctccattgcaagtaaaccaagttgagttgtagtatgaccaccggttccgaaagctagacctggatctaggcgaatcaatttttgatcagaaaatgctgggtggtaatcttcccattcaggaacaatagccagatgacgagaaaaatcaattacgtgataatatttctgccaagctgtattccaatcttcatctgccacttctttagtactgattgaaacttcgccagtatttaagccataacccttcatctccgcaatcttatcggtaatttttttaactagctcttttttatcagcattttcgtaattaaaatatgctgttaactccaaatcctttggtaagttttcaatatcatcaagttcaactaaactactatcatgcttttggccttcagcaacaaaatcgcttcgcttacgactttcaattccttgtgcatctagttcatcttgcatgaaaaaacttaatccgtcttcaagttcatgactacattcaacttttactgctaataatttcactaatcttgtccccttttgacatgttaattttccacgtttatgatattaaaaggtgagaaaaatgtcgaaaaaaaataaaaagaaaaaacttaataagacgttagtcgaaaaaatgctcgaccaacaaaaaattccatataaacaactatcatttaacaccattcaaaagggtgatgttaaacaaatggatacttccattttagacgatgaagaggctttggtctacaaaaccttagtatgtgaaggaaataaaaatagtccagtagttggcgttgtgccagttactgaacatttgagcatgaaaaaactcgctaaagcttctggcaataaaaagtgtgaactgcttcctctcaagaagttagttgctacaacgggatatgttcatggcgcaaacacaccaattggtatttatcaaaaacatcattttccaatttatctcgacagcggtatgaaagaacatgatcaaattgctgtttcaagcggtgaagttggacgcagtattatgattaatccagaagatctacaaaaaatcactgaagccacttttgttgatttattagagtaataaaaaacttccttagactagaatttctagttttaggaagttttttgtattattttttagctattttaactaatttaaacacgccgtaaatcaacatcattacccagccaagaattgaaatgtatagtaaaatcgtaaaccatgctggcgtcttaaatgaaagaattgccgtatttttaccgcgttttgattgaacaattggcattccaatttcattaagttttggatttatctttttgccatttactgttaattcagattgatggtaaataaaaactggaagtgtagttgtcttagcatttttcccattccacttaatttctaagcgtccccctgataaaactttcttactaaagtttttcctttgtggcgccatgttcattagcattcctgtaacatcagcagatttaattttcttctggacagggagataatcgggagtattaatgtcaattttattaatatatgcctctaagcctttctcttgcatctctcttgaattactaataattcctttattataagaaatattattattaatttcattgaaatcagctctgacattaaataaaactattactacagctaatgcactagctaacaagctgagctttttaccatgttctgtaactagttctgtaattgttaaacctaccccaaggaataataatggataagctacaacagtaaatcgatttggaaattgtaaatagccagttacggctgggaagttgtctttaacaaactgccaagggaataaattagaacttaaataaaagaatactaatccttcaagagtaacaaaagtgttgatttttgaagacttaaaattaaatgctacataaattatttgtacaataaatagcaataaagtgacttctgtaattgacgtccacatagtacttgtaccagcaagtgacaggttgacagaagtaagaactggtgaaaaatcaatcggagatgccatttgatttgtcggataaagaagcaagaacgctccccacacatttgctgttaaaacaacaaataatccaactgccttgaagacatcaagccacatttgacgtctattttcacttaagactaatccataaataaagaatggaattaaagctaagatagaaaagaatgtgctcaataagtgaacttgagccacaatcgccatcacgacgcctaaactaatccagctaaatctcttcttataattatttagaagattaattccttgaattaaaacaaagggaattaaaaccgcgccccaagaattaaaagcattcgaccgtaaccagtaagcaatataacctgtcgtcaaaaataaggcagtaattactgaagaaacagtccttgtcatctttacttttcggcttaaatgatacattcccagaccaccaactaggaaaatcaaataagttatcacaacttgaaagcgaagccaagaactacaaaacagaagtaagaatcccattatataggcaaaaaaaggtccataaagtgcattaactattcgaccactttcacccattccatagttcatctgaaagtaagaaaaattatggttttgaatttgctgattagtatcataaaaacgatgaaaatgaaaagcagtatcatctaaagtaagacctgatcgagtactcaatatcgtccaaattaagatagttgcaattactaaacttaaaattatcggaataagataatctattaatttactcttatacttttctatattactatttttcatttttaacctcagataaatattgacttaactttttaattgtatcattcaagcagtaaaaatttatacttatttaaaaatttatttacctgatggcatattcaccaaacttcttcccttactatatgcatgcttgatatcatttagagtcaaatcttttcccttttgatcataaacaactaagacttcccttactccgtccgcaaatttactcaagaatctgaaaatagtaatttctgcaaagaacaacactaacagtaaaaatactgcagttgccgagatacgtgaaagagcaaataagttatggaagaaaataactgctaaaaccagagccaagaatgaaccacctaatactgtccatctaaacttattcaatggtcttgaaatatggtatagaaccatcatccctactgcaactaaaagcatcgtggcagttgtagcgacttcttgtcgccctagagctaaaaccatatcagcaactaccaagatcgacacagcaagcatgtctgtaattccacctggaattgcgcgagataaaacatttggaataaattttccgcgaatacggttgtaattattttcaagagcaagtaaaaatgatggtagtccaatcgtaaatgccgagattaaggcaatctgtgccggccttaatggatatgacattgcaaaaaccaaagagaaaatagccatcaggaacgagaaaatatttttaaccaagaataagctagctgatctttcaatattgttaactacttttctaccttcatcaacaacttttggcattctagcaaaatcagaatcaagtaaaactacttgagaagcttgcacagctgcgctatttcctgatgccatggcaattgaacaatctgcactcttcatggctaaaatatcgttaacaccatctccagtcatggcaactgtattaccattcttttgaagtgccttaatcaactttttcttttgatcaggcttaactcggccaaaaacattgtactttttgacaacttcttcatagtcaccttcaccaatttcagtagcatcaattagtttatcagcatccttaattccagcttgcttagctactctagctactgttagcggattatcccctgaaataaccttgacatcgaccccttgccgttcaaagtacttaaaggtgctcttagcttcttttcgaattggattagaaattaaaatatagccgagtaattcaactgctttagagagattttgcttttcatcttccaaggcttctggatattgagcaaaagccaaaacccgatagccttgactagtatattggttgatttctttttcataatctttaaattgatcacgtaatacaaactccggtgcacccataagtaacgtactttcaccaacaacggctccactatacttatttactgatgtgaaaggaatgatcttttttactttgatatcagacttttgattaaaaacgtctgctactgccttaattgtggcattatcatggggcatattttgggcaaaaatagaaatattttttgctaaattatctgtacttgtgttaaccgggataattttttcaacttccatttttggttcagtaattgtccccgtcttgtcaacgcataaaacattaactctagctaatgtttcaacgctcttcatatcatgcagcattacttgggaccgcgctaagcgcattgcagctaaggctaaagcaatcgttgttaacaaatacaatccctctggaatcatcccaattaccgctgcttccatcgataccacgctatcagctaaattcaagtgattcacatagcgagcaaaaatgaaaagtgctattccacatggaataataataattccaacccacttaattaatcgattgatcgaacggaccatctctgatccttcttttgaattcattgacttagcttctaaagttaacttagaaacataagaattcttcccaactttttcaagtcgtgcgtatgctttcccagacactacaaagcttccagacattaattcgctaccaacgtctttttctatttcatctgcttcaccggttaacaaggcctcatttacacgtaaggttcccgaaataacctgtccgtcggccggaatctgatcaccagtctgaaggacaattacatctcctaagactaggttttcaataggaataacttcttcttttccatcgcgaattacagcaattttagttgtattcattacgtttaacttatctaaaactctttttgcgcgtaattcttgaacaatcccaatgatcatattcgcaataattactggtaagaaagttaaatccttatactcaccaacaattactaataagatggatagtactagaaaaattaagttgaaatatgtaaaagtgttttctttgataatttgccatgtcgtcttagcctgatcattaacagcacggtttacttttccttctttagttctttgatcaacttctgcacttgttaacccaattggttgtttaaaattatttttcatttatttccctaaaactaatctacacgaagtgtatcgtctttttctattgttacttcaccaactacatcagtattaaaaaattcagcaatttgatgaacgtcccatccttgacctaagccccacattaacttagtaatggcactttcagatgtcatatcacgcgcactaattgcgccttcaagaagagcttctctacctacttcatacttagtaaggtcactgcgttcatataagcattggctacttgcaattactggtattccctggcgaattaattcaccaactgctcctaccatatttcgtctaatataattcattccacctaagccatacgcctcaataacaattcccttacatccacttttaaccattgcaaatagtaacttgggatcaaaaccaggaaataattttactagtgaaacatggggattaatttccgtatttaaagtacattctctagtattttttgacaaattctgctcagaaaaaacaagaccatcggatgtaactttagcaacaggcggtacattcacgctttcaaaagcatcaaagtttatcgtcctaacctttacactgcggcatcccaacattacttttcgatcaaaagccaaataaatatttggacaacaagtagctgctgctgcaaaggctagtcttaaattatctggcgcatcacttaaaaccacgttaatcggaacctgacttccagttagaacaactgggatattaatattttgtagcatgaaagcgagcatcgatgctgtatatgccatcgtatctgtaccgtgagaaactacaataccatcatatttatttctgttttcaaaaattttttctgcaattaacttccattcttcaggctgaatattagaagaatcaagttgcaagatatcttcaaccgtaatatcatatggcagctcacccaacatattgatcaattgttctccagattccttaggcactaagcctgcatctgacacaacagaagcaattgttcccccagtagaaagcaataaaattttcttttgcataatcgtcactcattctttatttactatcctattgttctattaattatacgaaaaaagttgccatagtttaaattctatgacaacttttttgtgaaaaattatcctgcatgacgccaatctttgtccattaaaattctagctgcaatcagtcctaatggtaagcaaatgacaatcattaaggcctgcaccatccataaggcaccagcattcaatgacgttaatcccaaattaaacattgcacgatacatatacaaacctggaaccatgatcacaattgaaggcacagtaattgcaattcttggaaaaccaattttacgtctaataattgatgcaagcatccctgctacgaaagccccaataaaagcagcaactgctggcggtacgtttgaccaattaactaagcttaaacgcaaggtattagcaacagctcccgaaaggccagctacagttgccattgagaccttagaattgaacataattgagaaaccaaagaccccgcaaaaactagctattaatcttaaaagcgtcaaaactaccggcgttaaattcaacttttcaaaattctgtgggtgcaaatttaaaactaaagccattacccaaccaaccgctgtagcaacaacaataatcataatagcataagccatccgctctaaacccgaccgcatatctaacttagaaaggtcaagtcctgatgtaataaatggaaatcctggaattacaaatagcattgcgccaatatatccatctaaatgatgtaaacttactggataaaataatctgattaaatagaaacttcccacataaactgcgcaagcaaccgctacagctacagtaatattcgccaaaatagtgagatgacggtctgccattttacggcgtacataatttccgcagctagctccaaaaaaggcacaaataacttcaaaaattccaccaccgagtaagaagataaatcctccacaggctaaaccagctgctaatccaacttgccaaggtgaataccttgacttcatagttgaaatttcttctaaacgattatgaatttgaccaatagtccagtttccatcatcttctttaaactgattaacaaaattttccattcggtccagttttgttgtattaacgccagttgttggtaaactcaaggcctgagtatagctcttaccatcggcgtcaacacaagtatactcaattgatactaagccaatatcagtactacaagtcatatctaaacagcgagcaattgtattcattgccgatcttactcgccaagctcctgttccatatgacaaaagcatcattccaatatgacctacaatcacagaacgttcagccaaagtagcatttttagctggtgtaatattatcactcgtaaaaaattcttgccaacgaattcgcatatgatggtgatgcgacaaagtatgctgatggtgtaattgatttacacgctcaattttgttttccttgtttttcacttttcatagtccccaaactttgattaaatatcatacctttaaaattttatcacagaaaaaaggccttgcactcttaatttaagtaagtgcaagacctttttctatttataaactattgtttatagattgattccatcaacaacctctttcatctttgttgctgaataagtcattttcttcttttcatcttcagataaatgaagttcaattacatcactaattccgttagctgtaacaactgctggacttccaagataaagatcatgaataccatattcgccagtcattggagctgataatggcataacgcacgcagtattttctaaaattgctttacaaatttgagttaagcacattgcaacaccatagaaagttgcacccttgttagcaataatcttgccaccctttttgcgtacatcagtttctaattcagctaaagtttgttcatctaattctttataagaacgaagtggtttatggtcgatgatggcttcatcgaagttttcaaaggaagtatcaccatgttcacctaaaacataagcatcaatgtgatcaacattcacacccgtcttgtgtgataatgctacacgcaaacgtgctgtatcaagggatgttcctgttccaataaccttattcttaggaaacccagataatttttgcgttaaagtagttaaaatatctactgggtttgcagaaaccacgaaaataccattaaagccagaatcaacaatcggctttacaattgattctaaaattttaacattagtatttactaagtctaatctggtcatccccggctttcttgcagcaccagcagtaattacggcaatatctgcatctttagcatcactgtaatctccactctttactgtacattgaccaacaaatggagctaggtcctctaagtctaaggcatctccttcagtaattttcttaactacatcgcaaattaccaattcatcaatttttacattttgcaataaatcatttgcaaaagttgagccaactcgaccgtcaccaactaaaaatacttttctacgactcatttttatatataactcctttgaatgaaaacttaaattttacactttaagtatacacaaataagctatctattgaaagcgctttatttgattaactctgccatagctttccctgcttcacgaccaaagataattgtttcggcaattgaattaccaccaattcgattatttccgtgcaagccaccactaacttcaccagcggcatataatccagcaataaaattaccattagtatcatatactctagtatcaggtgcaatatgaattccacccattgtatagtgaatagcaggtgcaatatgaatagcatagtatggagcatgatctaaactagccataccagtcgtacgtccaaattcttcatcactattcttttcaactgcttcattccaattttgaagggttgctgtaagatttgcagctggaactttaatattttcagctaattcttcaattgtatttccatgaacaactaaattaattgagtcatagaattcgatcgccttaactctgtctctaactccttgatcaaaaattaaatatgcagaatgctcaggagtttcagtaatcgcattagagacaatcttacgagtacttaattcattaataaatcttttaccctggtgatcaactaaaattgctccttcaccacgcactgcttcgccaattaaatacgcgtgatctgtatcttgctgcacagttggatgaacttgaactaactccaattgttctaattgtgccccaactttatcagctaattttaaaccgtctccagtagcacctgcttgattagttgttttgtaatcacgtaaatcgggacgatatttagcaattaaatctttagcagcaccgaaaccgccagtagcaagcaaaaccgctttagctcttattcgacgttcattattaacttctacaccagtaattttcttatttttatcttgcaataagttagtaacctttgaatcgataaaaattggaatgtgacgttcatctgccagcttaagtaaattattaactaaaaaggcaccgattggagccattgaagacggacgatgcgtcctctttttagacataccacctgtaatagttaaatcatctaccttaatgcctaaatcttcaagccaagcaatagctaaaggtgcatgctcaacaaaataatggagcatttcacggtcattcatataaccgccaccttttagcgtttcatcataaaacttttgcatactatcgtttactcccagacgagcttgaacgatactttcagctgcattcatccctgaactagctctcatagtatttccacctaaaaagctatttttttctaaaatagcaacatttagaccatattgatgtgcttggattgcagctgctaaaccagtaccgccactaccgacgataattgcgtcatattcttcctttaaattatctactgtttgtgttggaaatttatatgccatactttccccttcttttaatcatcaattggtttagtattcattgcatttgtcatcgtgattggcttcatccatttatcgtattgttctttagttactagaccactctttaaagctgctgtccgtaaagttgtattttctttagccgcagtttgtgcaattgtagctgcttcgtgataaccaatatgaggtgaaagtgcagtaacggtcattaaggaatccgtgacatcttttgccattctttccttgtttacagtcataccatgaatcatcttattagcaaagcttgaaatagttcctgataaaacatttgctgactctaagaatgctgcaatcataacaggtttgaagacattcatttcaaagtttccttgagaagctgccattgtaattgttgtgtcgtttccaaatactctcaagcaggccatagtaactgcttctgcttgagtaggattaactttacccggcataattgaagaacctggttcatttgctggtaaatttaattctcctaaaccagctctgggaccggaacctaagaaacgaatatcttgagcaattttaaacatatcagcagctaaggcttttagagcaccatgaacaacatttaagcctgagtgatttgctaaaccgaagaatttattagtttttacatcaaattggtgaccatactttcttgataaacgctcagaaatatcttcagccatacctggagctgcgttaagtccagtaccaacagcagttcctccaattggcaattcatataaagtttcttccagttcattaatataagccaaatcatgattaagcgcagcaacatagccggatagttcttgaccaaaagttaatggaatagcatcttgtaagtgtgttctacctactttaactgtagtccagtattcatcttgcttagccttcaattctttaattaggtgtttgacagatggctttaaatcatccagagcttgcgtagcaactaaattcattgcagtcggaaaagtatcgtttgaagattgtcccatattcacgtcatcattaggtaaaatatttaagccaggatgattttgattagctaaattggctacaacttcattaacgttcatattggtctgagtaccagatccagtttgataaacatgaagtggaaagtatggttgcaactcttcattatttaaatcaagtaattgatgaattgcttcaataattgcgcgtcccttttcttccgtttcagtaccagcttcaatattagcttgagccgcagctagttttatttgaagaagtgcccgaataataccaattggcattaatgctccagtgtggaaattatctttacttctttgagtttgtggaccccataatgctttttctggaatctccactggacctaatgtatcactttcaacacgataacctttttttaccatattttttgtcctccgttttcattatcttcattataagctacatttaaatgaaagggcatacaaaaagcggagaatataattcttcgctaatataattgtattaaattatactaaaaatacttattcaatgccatctgattaacgttcctggtgattcaatttctttgctactaaatcaccaactacttgtacaattagcactaacaataagactaataatgttgctactaaagtaacatcattattaaatcgattatagccataagaaatagctgtattacctagaccaccagctccaacggcacctgccattgctgtcaagccgattaaactaatcaaagttactgtcgacactctagctaattcggatctactttctcttaaataaacatcaaaaataatatctttagttgaagcacctaaagcttcagctgcttcaatctttccattatcgacactttcaagcgcaacttgaacttgtctagcaaaaaatggaaaaacacctaaagttaatggtactaaagccgctttcattccaatttgagtaccgacgattttctgagtaactggagcaacgaaagccagcaaaataataaatggaacggctctgaagatagatacaagtttatcaacgatccaataaacaactttattggctaaaattccttttggtttcgtcaaaacaagaagtaagccaaaaaccaaaccaaggattcctccaaaaatagctgaccaaaaagtcataaataaggtttggaaaatagctgttccccaaccagcatctccaccccaacctagggccacaacattaggaaagtttttagtcaaaaaactaatcattagtcagcactcctttatctaatttcgttactacaacgtttttactctctaaaaatttaattgcctctttttgtttctgctcatcaaggttcaataaaatagcaagtgtgccaattggttcaccacttaagacttctacatttccatacaaaatacttgctttagtatttaatgaaacatctaaatcggcaactactgacttagtaacatcattaatgctataaaccaactgatataattctgcattatctgccaatttatcaaagttgtacgtatttaaaatatgttgagcctgcaaagcgccacctacaaattgacgtgtaagctgcttttgaggatgcaagaagacttctctcaaatctcccttttcaattacttttcctttttccatgacagcgattttgtttgcaactctttttactgcatccatttcatgtgtaattaagacaatcgttaatcctaattttttattcaaatcataaagcaaatctaagatttgattagtagttttagggtcaagggcactagttgcttcatcagaaatcaaaatatcaggatcattagctaaagcacgcgcaattgcgacacgttgtctttgaccaccagataattgtgctggataaaagtcagatttatcttttaaacctaccaattctaataaatgaagtgatttttcttctaattctttgtcagacaaatgcgtatgctgcaacgcaaaagcaacattttcaattacggtttcttcatttaaaagattaaaattttggaaaatcattccaattttccgtcttttttcttgaagctgctttttagaaacctgaagtttaccttccttgaataaaattgtcccgttaacttcgacagaaccagccgaaggatattgtagtaaattaattgttctaaccaaggtggattttcccgcaccggagaaaccaatcacaccataaatatcgcccttatttatttctagattcacattattaactgccttatttggtccaaattgaacagtgatatcttttaaattaatttgtgctgtcattagactttctcctctcttacttcaacttcaatccccaagctgcaacttcagttttaccgtaaagcttttcagatagcttcttagttttttcagtttgatatgccttaactaaatccttgtagaccttgttattcttatcctttttatttgcgacaataatattaatccattgttcggaatccttatttaatggctcaatataaattgtctgcttgtcacctaacttagctggaactgcgtaggtattattaacaatacttgcatcgacatcatcaattactcttgctgtttgctcagcactgacttctttaatctttaatcccttagggtttgacgtaatatcagcaactgtagctaacttaacgccttttcttaatttaattaaaccagcattctttaatacatataaagctcttgattcattagaagcatcatttggaactgcaattgtagctccttgtggcaactcattaatattctgatatttctttgaatacaatctgattggagcaatataagtatttccaattgcaactagtgaaccatgatttgccttattccaagcgtttaaaaatgtatagtgctgaaaggcatttagatcaatatcgccattttgaagagccttatttggctgattataatctgtaaagttcttaatcttaatctttataccataatcttcttttgcaatttctgcgacgcttttccaaatctctgcgtcttgtttagtttgaccaactaccccaacaactacttctttttgatcttttgtattagtactcgtggggccaaaactaaaccaaccagcaatgacaattaaaactgctaccactgaccaaattatccgatttctaattctcttcttatgcatcgtgctttcctcctaaacaaaaaagcactcatccttaaaaaggacgagtgctcgcgttaccacctttaatttgctatttactcacataaataaccttagtaagtagctcctacaatcaaataggaattaccttgcgttgttaacgatcgcaactccgttgataactcattattaaaattcattaccaccattttaatttctagtccatcttcaattagctgtcctatctacttccaccacacgtagactctctaaaagaacattcctaatttactcaactagcaaaatgtttaagttaattgttaaaaatatattataatcttaagcaattttcgtcaagtctttttttaattttttattttcttatcgaaaccattatattatcctgatacatgaggatatttatgaatggagcaagtaagatgaaaaataaagttgtcaaaataatcatgtggatcctcttttggttctacctaattccatattatcttgttaaaaaatttttatttaaaaagacctctcacccaattctttgggcaaattgcgtcacgcttggcctattcttcgtattagggctggctacctctcctaatacacatactacaagccatcaatccgctcaaaaaaccactttaactaaaagcaaaaaagtagcccataagactgctactgagacaattactaaaaaagtgggaacggatgaactaaataaagaaaaagctagagctaaagttctcacacaggaagaaaaaaacaagcaagctgaatatgataaattaaaaaagcaacttgataactatcaagaaaaagaagaaaaacaaaaacaagaagctgaacaagaaagaaaagccgcagaagtccaagctcaaaaagaagctgctgctaaaaagaaagaaattgaagaagcccagaaaaaagctcagcaaaatcaagaaaccaataatgatagctcatccagtcaaggcgatctatatacggcaaatcaaggtacaattgtcggaaatcgcaattcaatgatctatcacgttcccggacaagcaggctaccacatgcattcagctaatgcagtctattttaacagcgaacaagatgctattaatgctggttatagaaaggcaaaaagataatgataaataaaaaatttactcaatttttagcagctgccctcttattttcgttaggtgcaagtcaaacatatatctcacagacaagttcagctagtgatatcaagattgttaaaaaatataagtatgactatagtaatcaaaaagaagttagtcgcttaaaaaataaaaaccaaaaagttgaaaagaaaattagctctttggacaaaaaaatagctgatcttcaaaaacaattaaaacattacaccaaccccaatgctgttgagtctttaagtaaacaaaaactatctactctcaactacgagggtaaaagtattattaatgttgataataataatcctgatttttcaaaagaagatttggataccagccatggcgcttggcaaaaatatggtgatcttgattctcaaaatcgagtaacagctgccaatgcacttttaaacaaatcattaatgccaaaggctaaaagagaagctcttcatgttaacccaactggctggcacaataaaaagattaaccaccattggctctttaatcgttcacacttaattggctaccaattaaccggtcaaaataataattggaaaaacttaatgactggaactagacacttaaatgatcccgacatgctaatgtatgaaaatgaagtagccacttacttaaaatcctcgccggctaattatgttcgctaccgcgtaacaccaatttttagaaataatgaattactcgcccgtggagtcgaaatggaaggacaatcgattaattccaatgatgttcattttcatgtttatattttcaatgtacaagatggggtaaatctagattatgctactggaaatagcaaaatttcttaaaatttaataaaataactacattaaaattttgatatttgttatactgcttttcgcctctctcaaatttcctaagtttaaatatattttaatagctcatagcgccagtatggttagcgtttgtccaacaggttttggtgtatgaatatactaaatgaaggaagataatattataaattcttcatttaattacagtttaactttattctaaaaagcgcaggcagaaatctgtgtgaaaggaattgtgattgaagtgatagacaacttaggagctgcgatcaaaaaaagacgcaggagtttgagaatgactcaagaagacctggcggaattcagtagtctatcagtaaatttcatctctaaaattgaaagaacaggtaaccaaaatatcagtattcaaaaattagatgcgattgcaaaggcactacaaacatccgtaattactttaattgatgaatcctcaaaaactcctgaatcacagacatttgtaaataagttaagtaatgaccgtgtttttcttgacaagcttacaaatgatatgaaaaaacttcctgttgaacaggaagaagctttagctaagagttttattactataattaatacttttgctaaagaagataaataaaaaactttgacatttagaattgcaattttgtgttctatttgtcaaagttttttcttttatttaatattagtaaattttttcaacttgatcttgaatatttttattatttaaaaattcatcatagctcgtatcagcacggctaacaattcctttaggtccaacttccacaatatgatcagcaatagtttgaataaattcatgatcatgagaagtaaatagaatcgatccttgatagtcctttaatgcgtcattaagggaagtaattgactctaaatccaagtggttagtaggatcatccattaccaatacattagctggttctaacatcatcctagagagctgacagcgcaccttttctcccccggaaagtaccttaatttttttatctatttcttctccagaaaagagcattcggcctaagaaaccacgtaagaaagtgttatcgtcttgttctttagtagcatattgacgcaaccaatctaaaatcgttaattcatcattgttaaagttagcattcaaatcgcgagacatgtagttaaacgcagttgtttgtccccacgttacagtaccactttctggctttactttaccagcaataatatccattaaagcagtagttgccaaggtattgcgtgacaagaaagcaactttatcaccaggacgaacgataaatgaaacgtggtctaaaatcttttcaccgtcaacactataggacacatcttctactttcaataagtcatttcctaagtcccggtgcatttcaaacttgacataaggatatttacgagaagatggtttaatatcatcaagcgtaattttttctaactgcttctttcttgaagtagcttgtttagacttagatgcatttgccgaaaaacgtgcaataaattcttgcaactctttgattttttcttctttcttagcattttggttagctgctaattcagatgcaagtttacttgattcataccagaaatcataatttcccatatatagctgaattttgccataatctacatcacacatttgcgtacatacttggtttaaaaaatgacggtcgtgagatacaacaatgacaatatttggataatcagccaaaaaatcttcaagccagtttacagtatgaacatccaaaccgttagttggttcatcaagcaaaagaatatcaggattaccaaacagggcttgcgctaataaaactttaactttttcggcttctggcaactcactcattttactttgatgcaagtcttctggaatacctaaagactgcagcaacttagacgcatcagcttccgcattccaaccatcaagttctgcaaactttgattctaattctgctgcctttaccccatcttcatcgctaaagtctggcttagaataaagttcatccttgtccttcattacttgataaagttctttatgaccctgaatcacagtatctaaaacagtaaaatcttcaaaggcaaagtgatcttgatttaaactagacattctttcattagcgtcaatagagatatttcccgttgtaggttcaattttaccttctaaaagttttaaaaaagtcgacttacctgcaccattagcgccaattactccataacaattaccgggagtaaattttaagttaacatcttcgtataaagtacgaccagataaattcaaacttaaatctgagacagtaatcaaattattttcccctcttacatctaatttttcttatagaaagcgatcgactgaagaattaatgcaaactagtaataaatgtagttaatccaaataagattcctggaaaattagctacaaataacggccaatctttcttctctcttaaaagagcatataaaacccaaataaggcagttgatagccgcgaccaatggctgaattggatttccatagtttccttgcaaattattcataatttgaggaatataagaaacatacatcaaaacagacaatacagatccaattcgtccaattgttaatacagttttattatcaaaagatttaattttctttttcaactaatcttcctttctataactatagtatctagtttacttactttccataactatctcaagcataaaaaaagagattgatcaaaaatcaatctctttttaaagaaatattaacttaaattaatctaagtcaacgttgtctgggaagaatgctaaacgttcacccttaccaagttcttcttcgatttcaagtaaacggttgtacttttcaacacgttctgaacgagctggagcaccagacttcaattggccaccgttaacagcaactgcgaagtcagcgatgaaggtatcaccagtttcacctgaacggtgagaaatcatagtgttgtaactattcttacgtgaaagacgaatagtttcaagagtttcagtaacagtaccaatttggttcaacttgattaatgaagcgttaccagcaccttcgtgaatagccttgttcaaaagcttagggttagtacaaatgaagtcgtcaagaacgatttgaatacggtccttgtggctttcagtgaacttaaccataccttcaacatcgttttcatcgtatgggtcttccatagaaattaattctgggaattcatcaagtaacttgtcgtagtaatctgccaattcttcgtcagtaagaactttaccttcaaggtggtacttgccgtcttctttgttgtagaagtatgaagcagcacagtcacatgcgatagcaatatcttcacctggcttgtaaccagccttaatgattgattcatgtaatgcctttaaagcttcttctgagttcttcatgttaggagcgaaaccaccttcgtcacctaaaccagtttcgtaacccatgtcttcaagaactttcttcaaagtgtggtaaacgttaacgatcttttcaaaaccatcacggaatgaagtcttagcaactggagtaatcatgaattcttgaatatcgataccgttgtctgcgtgttcaccaccgttaataacgttgtggaaagtttgaggcatttcaaggtcagtaccaccaaggtaacggtacaatggttggttgttatccttagcagctgcacaagcagtagccatagatacacccaagatagcgttagcaccaagacgacccttgtttggagtaccgtctaaagcgatcatagttgcgtcaatgtttggttgatcgtgtggatctaatccctttaaagcatcattgatttcagtgttaacgttgttaacagcgttcataacacctttaccaccaagacgtgaaccaccatcacgtaattcaacagcttcgttttcaccggttgaagcacctgatggaacttcagccttacctacgacaccgtttgaaagggtaacgaaaacttcaacagttgggttaccacgtgaatcaaagatttcaagtgcatgtacattctcaataactgatttgagcattaaaaaaatcctccttaaatttgtggcgaaaaatacaaactaaccgaattggcactagtcagtgtctttcgtcgcttttaggcatagcccttttgactacagatttattttaaagcaactttgtgagtatgtaaactaaagaagcaattatttttttgtaaaaaaagattgacccttaaaaggccaatcccaaaagttgttgtgcaattgtaaaacaaaatagagctaagctagtcgctcctaaaacgtcagatggataatgtgctcgcatgtttaaacgtgaaataaccactagtccccaagcaattatcaaagtaattagcaaccaaatccccatagtatgtccgaaaatctgccaaagcatcaacgacattatcgtggcacttaaaacatggccactcggaaagctatatccatctcgataagttttcattgataaaggtctttgtcttttcactgaatgcttcaaaaaaatgccaactgcatcagttacagctaaagtaccaagtgcccagactgctaaccagggatgatcaagcaaaactaaaagtccagctagcaaaaaatcccaaactacaatcactttaggttcatttaaaactgtaataatcttccaaattttgctatctctatttctaacaagtttatggtgcaatagatgatcataaaaattaaagagacgcgaatttctaatattaaatattaatcctaatagaattattgctgaaatcattaattgaattaaacaatgcaatttcacttttatctaacctcaatcaaatgtgctaatgatcattgtaacagcaaataaataaaagacatacgtttttaaaatttatttaacaaattaagataaaaaaagcggtatatcaatattaagtaatactaatataccgtaaagctacataaaattaaggagagtacaggatttgaacctgcgcgccggtataagccggttcgccggatttcgagtccggtgcattaccactctgccaactctccaattacaacgctcttattatagcaattaagaaataaatggtaaataaaaaaatgccaattctaaaattagttgtgattaacaagtgataatgtcttaactgttaacttaggaaaatgtcctaataagatattaactatgtcataatctcttttattggaggttatggattaaatgaagaggatttatttaactatgaaatatgaagaacagtataaagtcattaaagatcttattgatcataatgggaacaaacatagggctgctaaaaagctaggtatttctgttagacaagtaaatagaagaattaaacaatatcaagataaaggaaaagcggccttcgttcatgggaacaaagaccgcaaacctgttaattgtctcaccacagaaattaacaatcaaattgtaaccttatatcgctctaaatatcaagattgcaatctgaaacattttgttgagctactagaaaatttagaagatattcacgtctcttacactaaggtctatactctccttaaaaagcaagatattctatctcctaagccatggaaaaagactaagcgtgctttagcgaaaaaaagatggcgtacccaacaccctaagcaaacaaaagaagaagttgaagttgcagtcaatcatcagctggctgtggcagacgctcatcctcgtcatgaacgctgtaaatattttggcgaagaaattcaaatggatgcctcagtcttagtttggtttggtactcaaagagcctacctgcatctagcaattgataacgctactggcattattgttggtgcttattttgactggcaagaaaccttaaacggctattatcatgtcttcaaacaaattcttcaaaattatggtatcccactctgttttaaaacagataaccgcactgtattcaactacgaaactgctaagactaaatctgctcataaagatgtcctcacacagtttggctatgcttgcaaaactttaggcgttgatcttaaaactactagtatttcacaggctaaaggcatggttgaaagagctaatcaaactgttcaaagccgtcttaaacctgagttaagattagcaagtgtaaagacaattgaagaagcaaacaagtatctgatagaacagtttgtccctaattttaacaagaagtttggcaataaaactcgcaaagggtggtctatttttgaagttgctcctagtgaacgcaaaatcaattacacgcttgctgttcttagtggcagagtatttgatagtggctcagctatttcttttaagaataagctctatcaagctgtagatgaatacggcaagttaatttgtttcatgaaaggcaccaaatgcttggtaattgaagctctaaatggacagttattagctacagtagatgatcatgtttatttactcaaagagattcctaaaaatgcaaaaatatctccagaaatagatcaagagcctaaaaagaaaagagctggaagaaaatatattccgccaatgtcacatccgtggaaacgtgagtcatttttaaggcaacaagcaaaagctcacaaatatcatcaatatacataaaaagcggagaaaaattctccgctaataattaacaaattttaggacattatcctaagttattgacagtttcgtaatcatttttcttaaaaagtgttttaaatgaaaaaagctgcatcacgtcttactcaccatgatgcagcttttcaattatatcacttattattctactttatgacatagttttactacttttctcaatctctttaattcgattaatgtccattttcagtagattttgttttagttctagccactgtttacttaaatttctactttttttccttgcttctgtttctgaataagtaactaatttctctaagttagaaaagttctgaattaactgatgcgcttgattttgagccaatttaaaatcaatttttacatcttttgcatcttcactaacttgcaaaattgcacgaacctgtggttgacaaaaatcttgtaaaacactggcaatttcttgcaatttttcaacaccacttctatcaaaatgcaataaatccttctgttcatccttttccactagatcaattgcagcttcatttctaaaataaagctcctgagcaaaatcgtgaatatctttttctatcgctaagaaattcttgttcattcttaattacactttcttttgcttattttctttactcagcttaaacataatccaatcacacagcaaaatcaaaattccaaggctaaaagttaaataaaatgccgccatacttccctgagcagttaaactagcgtaatttgcagaatgcttattctgaaaaatagctataattgctgctaaaattgctgtacccattgaaccagccaattgttgcgctgtttgacaaacagcagtggcatctgatttaaggtcattatctactatttttaaactttgagccattgtattactgaatgacattcgatgtcctaacatcaaaattccataaaagcagataatcatccaggtatttaagtttaatccccaattagccaataagaagctccctaatgccattaaaaatgctccactatataatggcactgtagcacctaagcgatcatataagcggccaaaatatgggtttaaaagtccagcaataatacttcctgggagcaaaaccaaaccaccagttaacgacgtttgcttgttaactatttgaatataattgggtaatacaaaacttacaccaatattgataaattgaagtaaaaagtatgcaaatgccccaaaaacaaaagctttatcctcaaaaacctgcaagtcaagtagttttcgagtagattttttggaaattatcacaaatgaaatgaataaaaggaccgttaagattaatagtccccaaagacgccaattttgtaatcctttacttaattgatttacgccaataactaagcttaccaagctcaaacttaaaaatatataagccagccagttaaatgactttttttgaatggggtgataacttccaattacaataataccggcaataaagacaaatagagcaaagattgcagcaataatgaaaatccaacgccaattaagataatacgaaacactgcctccaaatgcaggacctaaagtcggtgccatcgcaattactaaaccagcaattcccatgtaaaatccccagcgttgtctaggcattacttctacgatcaaattaaacatcatcggagtacacaaacctactcccaatgccgaaattaatcttcccaaaagcaaaatataaaaacttgatgcaaaagcagagatcatacttccagctataaaggcaactgcagctgaaatgaacaattgtcttgctgtaaattgttcattttgataagaagagctaatcataataatcgcaatcatcagcaaatagccagttgtaatccattgaatagtgtccaatgaaacttggaattgcttcatcatagcaggaaaagttacatttaaactagtttcagttaaaattccaacaaaagacatgaatgctgttgccaaaactgcaagtgtatttttagtttgtactttcattttttctccaataaaaaagagtggaggctctcgacctctaccctttctttaactattaattatagttaattatagttatattaatccgcatactatcaaaatatactaagtagatttattttaaacgtttagtcaaatcatcatgtaagtcttcataaccaggcttgttcaaaagaccaaacatgtttctcttgtaactttcaacacctggttggttaaatgggttaataccgttcaagtaacctgaaatacctacagctaattcgaaccagtaaattaagtaacctaaagtgtgagctgattgattttcaatatcaacagtcataactggtactccaccatcagtatgagctaaaactacaccttcatatgcacgatcgtttacgtagttcatcgtcttacctgataagaagtttaattgatctaagttttctttatcgtctggaatagtaacatcatgttctggattttcaacacgaataacagtttccattaaattacgacgaccttcttggatgtattgaccaagtgagtgaagatcagtggtgaagttagcactagatgggtaaatacccttttgatctttaccttcagattcacccattaattgcttccaccattcaccaaacattcttaatgatggttcatagttttcaagtaattcagtagtatagcccttacgataaagaatgttacgaagagcagcatattgatatggattatcctttgatacatctggatcagtgtatgcagcacgtgcatctgcagcacccttcatcattgcatcaatatctccaccagctacagcaattgggagcaaaccaacagctgataatactgagaaacgaccaccaatatcatctggaactacgaattcttcgtaaccttctgcatcagcttcagtctttaatgcacccttagcgcggtcagtagttgcataaattctcttagcagcttcttctttaccatacttcttgattaacttatccttcaagacacggaaagcaattgaaggttcagtagtagtaccagacttagaaataatattaattgaaaagtccttatctcctaaccattcaagtaagtcatagaggtatgaacctgaaagagagttaccacaaaatacaacagttgggtacttttctttttctctaccataaaaagaactgtttaaaaattcaattgaagcttgggcaccaaggtaagaaccaccgataccaataccaactaaaacttcagaatcattttgaatcttcttagctgcttttttaatacggtcaaattcgtctttatcgtaattaattggtaaatcaatccaaccacggaagtcactacctgcgccagtaccttcgcgtaattcttgatctgcagcagttaccattgcttgcatttcctttaattcattttcatgaacaaacggagttaatttacttgcatcaaagtgaacaactttactcattatttaaacttccttttttgtaactttttcacgtacaaaccttattttagcagttacttcttcataaaactagagtttttgttataagaatcgataaataattcgatatattataaaaccaattatcgtaccgcaaacattgaaaaagacatcgtctatatcacttacaccagtttcaagaataaattgtaatccctcaatacaaactgaaagacagccaccgaaaaaaatcgttaaaagcatgctttttttctggataatttttggaaataataaaccgaatggaatgaaccatagaatatttccaagtgaattatagaagaaatccagcatactctgtccctgagttaacttaagcgtttctttcataaatactagattaatatcacctaaattgcgatggaaattaaaagttaactgccatggaaaatatgtgtctctaaataccgtaagcatcaataataaaatgacataaaaactaaaaagccaaacgcatgcttctgatttcaaagtccttcgatgtcttataaataagagccaacataaacgaataattgcaaagataataaaataaaaaattgtcttatctaagctatacaaaattaacttaattagggcaaaatgattaatatgtgctgcataatgatgatagatatattcatataagggttgtaaaaaaagcataacctaaccgactccgtaattttggcttaattataacgtaaagctctccatgaaagacatttctttccaaaatattaaaaaatcgcaaacctttaacaaaagtttgtcgttttttaaaattaccagtaaaatattccttattaaaaggagtagtgaagcgtgaataaagtaaaacgtaatttttggcaaaccagaattggattcttaacagtccttacactttgcttttgggcaaaatatatgtatgcggcttattttgattttaagcttggtttaagcgatccataccagcattttattgtctggttaaccccgcttggtacatgtatcattatccttagcttaggactttatttttctaaaccattaatttcatacattgccatgctggttttagatacaataaatacaattttgctctttgcaaatgtaatttattatcgtcaattctcagattttttaaccagtaaaaccatccaaaataccggtaaagtatcacagggactaggtaaaagtactgttgccttactgcatcctagtgatatccttctctggcttgacctaataataattattatcttattaattataaaagttatcaaaattgatccacgtaagtatggctttaagcgaccatttgcagtttcatcattcggagtttttatgttaactttgaacatgttcttagctgaaacttcgcgtccgcgtttgttaagaaacacttttgatcgctcttatgtagttaaatatttaggaattgatacttattcagtatacgatcttttaaaaagtgcgcagtcaaatcaagttaagaaaaacgctaatgccgaagatattaatcaggtattggctttcactaaaaagcattacgctaatgccaatccagaatattttggaaaagctaagggtaaaaatgtcattgtcttacacctcgaaagtttccagcaatttttaattggtttaaaaattaatggtcaggaagtcacgccattccttaactcgctttaccatagtaaagatacagtcagctttagcaacttctatcatcaagtaggcttaggcagaactagcgatgctgagaacatgcttgaaactggaacatacggtatttcagatggttcgcttttctcttctttagggtctgaaaatacatttcaaggtgctccacaaattcttcgccaaactggctatacctcagctgtttttcatggcaatactggaacattttggaatcgaaatgaagtatacaaaaatctcggctataactacttctttgatgcaaattacttttcacaaaagaaaaatgacaaaattggatatggtctaaaagataaattattatttggtgaaagtatcaagtaccttgaacaaatacagcagcccttttacgttaaatatctaaccgttactaaccacatcccattccagttagaccaagaagataaagacaataactttactactaccgatacttcaaatacaacaatcaacaactacttcgagacagctcattatcttgatcaatcaatcaaagaattttttgattatctaaaaaagagtggtcttgacaaaaacaccatggtcattctctatggtgaccattatggtgtgggtagctcagatgacgaattatctgccttagctcctgttctaggcaaagatttcaacaagtggacatcctatgacacagctgaacttcaaaaagttccattcatgatacatatggatggaatcaagggtaaagtagataataaaatcagtggtgaaattgatgtgcttccaactctactgcatcttttaggaatttcaaataaaaattatattcaatttggacaagacttattttctaaacaataccgtcaagtcgttgtctttagaaatggcacaataattactcctaaatacgtaattattggtggtaaaggaactaaagggacagtttacaaccaacaaactggagaaaaaattaccaaatttaataaaaagcaaaaagatgaaatcaataaattaactagctatgggcgtacttcactccactattcagatttattgaacaatcataatcttttgcgcttctacactcctgctggctttattccgacaaatccaactgagttcgactataaagtcaattatcaaaaaatgctgacattacgaaaacaacttggtaacaaatctacctctctctattctcaacataagggttcaactaccgacctttatgacacagatgcctctgaaattgataaagatgaaatcaacaaggttcctgaaaacattcagtctgcaacaagtgataaaagtaaaagccatcaggacaatgctcctaaaaaagataatctagaaaaataagcaaaaaagtatcgaaaaaacttaagaatcgaaaaatcctactaaatcagtgtcaagatttagtaggattttgttttaagttaaattctaaaatttgctaaaaatatactttttcacagattttttaatctttaataaattctttatagcccttatcatacaaagttagcgtaaattttgctcccttgccgggttctgaatcaacatcgatcttaccgccatgttgcttaataagcgacaaaacaatagagagtcctaatcctgattctccagacccaattttagccctggaaggatcagccttataaaatcgctcaaaaatatacttcatctgcttttgactcatgccaattccagtatctgcgatctcgaactgggctccatgcttaattctccaagcggaaattttaatttttccgttttcagtaaattgcaaagcattttgaactaaatttaccattatttgcgtaaatctatctttatctgcataaacttcaacttcagatggacaatcaagaatcaatttgtcatttttttgaatggctttttgcttcatctgagttaacaaattcgttaagacctcggtagcattgaatcgagattgaattagactaattttattatttctaattttttcgtagtctaagttttcatttactaacctaattaatcgtttagtttcactatgcatcaaagcaattgattttggctttgcctcttcaggaatagcatcatattcaaaaccctctagtagcccattaatcgtagttaaaggcgttctcatttcatgggcagcgtcagccataaattgctctcgtcgcttctcttgtgccttgatttcgtcatttgactcttttaatgcgttgaccataatattaaaattacgtgccaagtcatcaatttcgtcagtatctttgtgtttcaaatgtacattaaagtcaccttgagcgacctttttagtagcacttgataaaagtttgatttttctagaaatataatatgacaaaataaagctaattaggccaccaattactagagaactaagcaatgctgtaatcagattatgtttttcacgtacaatcatctgttcaacattctggacgcgcgaaccaatccaaataactccaaccaattttccattgctacgccaaggaacaattacactggtataagcatccttattagaaaaagacgtcacacgtccatcttcatggtcatttctaattcgaatagtttttccattcttcaattgtttaaataatttctgtggcaaagcccagttcattgtagtttcaggataaacttgcctatttttattattaaaaatgcgaagatttacatcttcgccttccattactacctgtaaattctttaaaaattttgcatctaattcatgtctaggattatctttagctaaagctaattttccaattgacgttccatatccttctaaacgtgaataactttgagaatatgcctgaatagttgcaaagtgaattgtggatgagccgataattacaatactggtaataattactagtaaaaaacccaacatttcttggtagaatagtttcaatttctatacctcagaatcgtcaaacttataacccacgccccaaactgtttgcaccacttgaggaccagctttttctagtttttgccgtaattttttgatatgagcatcaacagttctttcttcgccaaagaattcatatccccaaactaattctaaaagcttatctcttgaaaaaacttgttttggtttttgagccatcgtgtaaagtaagtcaaattcctttggagttaagccttcaacaatattatcatcaaagcgcacttctcttcgatcttttgaaatctttagatgcttagtaattacatcatactttacgccattagaagcatgcatatctttttctatacgacttcttcgatataaagctttaatgcgggcaattagtgctaatggactgaatggtttagtaacatattcatctgcaccaatgcccaaacccaaaatttgatcagtttctgagtcacgtgcagttaacataatgattggtattgaaagagaaatagcccttatttctttagctacttccattccatcctttctaggtaagttaagatctaacgttacaatgtcataagaatctggatgcgctttaaacatctcaacagcttctataccatccttagctatatctacttcccattgttctttactgaagaacatcttcatcatttctgcaacagaattgtcatcttcaaccattaatatctttagcattatttatccttaaatccttttactctagtatgtttaattttatctggttcaatataatcatgtggtaattcatgccgggcacgtaagaaagcctgcaattttttctcagttaagattatcggagccaaaataaacaaataaaaagtaagcaaccagatcaagaaatagcgatcccagtgtaagaaatgaattcctaatcccaatagaaattgaactaagccaaaaatcatgaaataatttcgtgcaactttttgcgcatacttgtaacttgtttcattaactgaagccaaatacgacatatatccataaacttgattcggattaggtgaaggagcgatcagccaaatgactccgattacaaacattattaccccgcaaccaatatatatcatttgaccaactccattcacttaaatttattctttaccaggagctgaaattactaaacgtaagtcaccgctaaaactaaagttcttcatctcattaggaataataaaattagtacccaatttgatattatattctttaccgtcagcaataaacttacctttacctttaattacagatactaaaagataaggatgatcatttagactccaatcaaaactcccatcaacatcgatctgccataaataaaaatgcggtgacattggtggttgagctaaagtagtaatctttgcatctcccaatgtttcagatgtaattttcagcttcggatctttatgtggtacttgaatagtatcaagagattgtttaatatgcaactctctctttttaccagttttcttatctactcggtcccaatcatacaatctataggttacatcacttgattgttgtgtttcaataaccataattcctttagttaatgcgtgaaccgttccagaaggtacatataaaaagtctccttctttcactggtacataacgtaaaagcttcgaccactttccatttttgatccaatcttctagttcttctttactagttgcattgtgcccatagacaagtttagcaccaggttcggcatgaagcacataccaactttcagtttttccagaatcattttcatgaattctagcgtattcgtcatctgggtgtacttgaacagacaaattatcatttgcatctaagaatttaactaatagtggaaattccttagccttgggattaccaaataattctggatgctctaaatatacttctcttaacgtctttccttttaatggaccggcattaactgtcgaagcgtcatctttgtatccagatattacccaagcttctccaacttttccatctggaatatcatatcctaaaactgtatttaacttacgtccaccccaaattttgggtctgaaatatggtgttaaaaataatggttccataaaaaaatcacctcaataaaagtatatatcttttttagatgattttgaaatcgatttcagctatttttttgaatatttttttattccactaattaaacgtttaattccatcctctaccatagaaattggtgaagctagattaagccgtaaaaatttattaccattaccgcgataaatactaccaggtgaaacaattagaccagtttcttttctaatataatcagctaattcttgactatttgacgaaactttacttacatcaagccacaacaagtaagttgctgggcctgatacaatttttacatcttccagattattagttatttctttttcagcataattaaaattacgattaattatcactaacaattcatgtaaccagctaaagccttcagtatatgcagcaattgttgctggaatagctaaaagatttggctcagccaattcatcgctgttaagacctcgattgacgatataacgtaaattttcatctggaataattacggttgcagcatgaagagcagctacgttaaaagtcttacttggagaaactaaactaattatattatccctcaaagcttcagaaactgaaaatgcaggggtgtatttaacgttatctctgaccaagtctccatgaatttcatctgatagaagaattacgtgatatttttgacataaagatgcaattctctctacttccgtaggtgtccaaactatctttaccaaaataatcaccattaatttcagcatttttaattttgacgtcctcacaagtccacattgtttcttctgcattagaaaagaaaacatgatctaatgaaatatgcttacaccgtctaaataacttaggagcttgtaaatctgaatttttaattgaaatattattagtataccaaataccgcttcgcgacattgtttcaaaggtactgtcagcaactttaatattattcgaataccataaaggatatttatatttaaaaatagtagattttatttctaaactttgcgtttcttttaatggtgattctccttcaccaaaagtaatattctctaaaattgtatccgaaaggccatatagcggtctttctccttcaaaatacttttctttaattatttgcatagatttcctcttttattaactctttcaatatttagtctaaattatgaaaaataaatgtctaatatttgctaactataacgaaatatatttttgagactgtaaaatagtttgtgtaaggatgaataattccttaaatttatttcttaaaacattagaaaaaggagttcctttctcgtatgattggtttgaacaaaaaaacacatacagaaagaagaactccttcatgaatgattttaccaaaaatatagcacaagctctattcaatcaagacaaaataaacgatttattgcgcaaagaactccagcaagcagttaatgacctattagaggctgaactgactgcgtttttaggctatgatccttatgccagagctggctggaatacaggcaattcaggcaatgagctacaacgaacgctatttcaatcgaatccacaaaggctttggtcaggttcaggataccttagaatcctactttgattaaataaaagattaaaaaatcaatctacgagaaaaatctatttacacaaaaaatttgacagtttcatatttttatgctatagattagttttgcaccaagattacttttcaaatttattatagaaaaaataaaattttgagaaaatttacagtttttcatactagaataaattaaatttatagcaaaaaaaggatgagtttcaaagctcatcctttttaatcaatttagttattacgtttacgcttagaaacaccagctaagccgataacgccaagcattgaacttacagcacctactatagctgcaacaataccatttttagctccagcttttggaagttctgattgagttgtcttcttaactgaagttgttggaacttctgaagttggtttagttggattatgcggagtatcaggagtatttggtgttgttggtgtattaggtttctctggagtagttggaacatttggaattggagttacaggttgatgtggcttcaagttatatccaccgattaagtcccaatcaactggtttgccccattcaccaggaagagcagcactatttggtgcatcttttttaagaacacccatcatatcatcgttttcgctagtgtcatcccaaatccagtcaccttggttagtcattttagctaaaacagtagtagtattatctggattaatttgtaacaagaaacttggtgcccaagttgcgtgcataccctttccagcaacttcaccacggttagtgatataagaagtaatcaataattgatcatctcttccttctactggaactgcatagtatgagtaagttgcagtacgccagtttgctggaacagaagcagttaaaactactccagattcatttaatggaacgtatccatgagttaggttatcagaaacgtaaccaatcattgcaacgttatcaccaactgctttattagcagccatccatgcatcgtcgttacttccacggtttaatctagtagcagcaaataagtaatacttgttgcccaaacgaactacatcaggacgttcaatttcatcacttaccattggagaactaataagtggtgtgtagaccttctcaacaccagggttcttagtatcattgtttaacttaataataccgattgcagcattagaccattttgctctatctttaatatcagagttagacaagatttggaagaaatcacctaaattatctttgttagtgccaccgtaatttaaccattgataaatttggtcagcaccttgataattctctgtaccagtacttgcttcaaaaacgatgtggtcattatcgacgtgtgcaatagaaatcttgtcttgatccttttcaagatttaagtagacagttgcacttgcaatcttttggtggttagtgttgttatcacttgtatcaaccttagtatagtaaagttggattgaaccatctttatttaaagttgctgagccagaccattgttgaataactggagtacctaagccaaaaataggaccagcattcttccaattattaaagttattgtcaccgtacttgttgtaaagaagataaatatgattgtcattagtatttggaactcccatcattccaactactaattgataaccattccagttagaaacataaccagttttgcgtcttgaactggccatgaatcccaaatttctaagtcttctacttttcctgtttgggcatccatagtttttgctgcaggcatgttcttaattttacttgcattaaagaaaggaatagcgtaacgagcatcttgttcaattaaagttttagcaattttcttaaagtcactgtaagttaattgagtaccgctctttgcttctttagaaaagttaatcttatttaattcattaatttgatcattggttaatttactggtatctacatcagattctttaacaatatctttaatttgaccctttaattcagctttgttatcgtttgatgctgtttttgttgaagtttcgttagctttttcttcagtatttgtcttaaatgaagtagctgctttttcatcttgttttactgcatcgttctttttaacatcagcagaagaattaacaggtgtcttctcagtaccatctactgtttctttagtagttgttgtagaggtggtagcagctttaacattatttactggtgaagtattaacagcatctgctttaacttctttagttgctgctgaagtcacagtagtagctttttctgctttagtatcaacactcttttctgagcttgaatttacttgattattatttttattatttgctgaagtagtagtacttactgctacagttttgttttcattaacgttgtctgcattagtagtagcagcatttacagtggaagcacttaatacaattgctgctgtagacaaggttcccattaataaagattttccgcttaaagacatcttcttatgatttttattttccaacatcttttctcctcctacatgctaagcgtttaacatttcatcttacagactatcaccttttgttataaaaataaatattattttaaaaaaattgtatagatttggcaaaatttactgtttttgtattcaattgccacttgtcaatcgtttatcacattaatactaaaaaagccacaccagataattactctagtgtggcttttccaactatttatggagatgagggggttagaaatttacccttgcaagtcctttaatatcaatgcttttagctattttaacttttacgtgaagcccaatatgaagccttaagattgcatgtaattagcaaagttggtggctgtttctttggccttatccttagttacatgagtatatatattcatagttgtagtaatatctgaatgccctagcctgttcttaacatctttcatagatacaccagcatcaaataataaggaagcgtgtgtatgcctgaacccgtgaaccttaatccgtcttaattcatacttatcacaaattgcaatattccaacgacgtggcttagataatgctgtatgttctcccttagtattagcaaaaactaaattactatcatctaaaaagtttagtccaagtttaaacatttctttctgttgttctgttctccactctttcaagtaattcattgtttcgctatccatatctagcacccttacactattagccgtttttcctggtgttatgattagtcgattattttcacccgatgataaagacttatctatattaatggtattatttttaaaatcaatatcagcccatgtaagagctagacactcaccgcgtcgcatccctgaataggcaagcaagcgaaagaacataaaatatttaaaattatattctttggcatctttcaaaaaggcttttaattcttccttactatagtaatcagtaaactttttattatccctttcaatttttggtattcttaccttttgcattggatttcttttaactagctccatatccattccatacttaagtaattttgaagtatagaatttgaaccgtttaaaagtcttaggtgcttgcttagaccattcatttactaccttttgacattcagcaacggttaatttatccacgtagatattacctaaatcttttaaaatatggttcttgaatatcttttcagtggtcacgaaagtactttcttctacttccatgcgatactgtttaacccacatatcatgcaaatctttaacccgtagctttttttgttcaactggtttatactcacctttaagaactttcaatttataattcataaaacactctaaggctttatctcgactggtaaagccttgtttttttatctggattgtatgccctgttttttcatccttaccagcataaattagaaacttatatcttttcttaccacttggtgtggtatattccttaatttcatcattcatgttaaatttacctttcactaataaaaggcgtactgattggctgatattaaacatttaacaaaactgtggaagttataggaataattcaaatgattagctattagtaaagatgatttaaatggtcttagaattgcaatctcagcattaacaagggaactcataagttaccatgtacatttacactttaaggtgtatttgtaactacacgttgatagcctgtacttttaggtactccctaccagcatatgtaaaagcatggagggatgtccgtaactgtagttacactcatagattatacatatgcagttacaactgcggttgttaattcctaaagggatgctagcaagccaaattattatttaaccaccaccctgattcaggttactggtttgagggatgaactaagcgctcagcccctgcactaccgaactagtaccgcagattagggatgctagttaaacacgtccacagggagtgttatatatatttttgatttattgcaatttgtcctatttcatttttagcattagttaacgcatcaattattttattatatgcttgctcatccatatccttacgaactttaaatgactgcacttttaaaccgtttttctcttctggtggctctaaaaaagctctattaacattacctattaaacgcgttagctgaaacactatttctttttgtactccctgcgtagtcgaataagaagcaccatctaaacttttaactgcttggtctatttgatgctgaacatcgctagaagcgtctaatctatcggtatctattagccttttgatttcatcttttatttgtttaactgagtagcccgtgtttttagcccactcatcccaaccgttaatatcattagataaacccatcaaataggaagtcggaacttgaaagaacattgctagcttatcccaagtttctatttttggctctcgctttccacgttcatattggctaatagttacatatgacatatttacttgttcactcatatctcttaatgacaagccctttgcttgtcttaattttttaattctattcatgctttcacttccattctttcactaatcttaacataatgtattcgttttgaaaaaaatatttgcgttttcattttgaatactttatcatgtattcataaagaatacaaaaaagaaggcgaaaatatgcaactaacagaaaaccaagtaacagcgattaagcgaaaacgtggcgaacttgacatgtctattacagttttagccaatactaccaaggttagtaaacgtactttaatagatattttcaaacacaaccacagaaatgtgactaaaaacacgtttaagaagctaaatgattggctgattgatgaatatgaaaggaagcaatagcatgaagcgaatttatagagcattcaaagactggctatatttaccagatagcaatgaagccgaattatacaacttgctacttttcggcgttctattcttaagtgcaattgtagcaatcgtaagttttaccagaacacttgcaatgtttttggcattgattagataagaatggagttttagaaatgatgaagaagatgaatattgtttatctaccactggtagaacaagcttatcagatgatgaaaaagcttaataagaacgtatctaagcaagagatttacaagaaactaattgaaactaatatgattgaccagcaaggtaatcctaccaagtgggcgcttgataatgggctagttagtgaatttaacacaattgaggaagcaagaaataagcttaatcaaataagcccacaaaaaatagaagaccaagtggacgcagatataaacaacgtatttagtcgcgtgccagttagtgcctttagatggaagaatgaacacgatggatatgcaattgatagtgctgaacttaaaaaggctattctatcagcattaaaagatggtagcttatcccctatcggtcgtaagcactggctagaagtattagcagatataaattcacaggagaattaagaacaatgaaatatattgaagttaaaaccttacctattaatgaagatgaagtaatcacattagcaatgaatgcaaacaatcttaccgctggacttgactaccttgaaagcatggctttaaacctagagggcaaaaaccagcaagaaatagaacaactatcaggattaatagcaggtatgaaagaattatcagcaaagaacgctagaattttagcaaatatcaatctttaggaggttacacaatggatattaagctagacgcatcccaagaacaggatttaagcaatcacattattaatttagtgaaagacagcgtaaaacaagcagtaaacaatgaaagcaagccctatttaaatcgtaaagagatagctaagtattttggagttgctgacagtacaataagttactgggctactttagggatgcctgttgcagttattgatggacgcaagttatacggtaagcaaagtataactaactggcttaagagcaaagaaaaagccgtgaaaagctgagacaattcacgacataaaaaataaaaacacaattaaatattaacacatataagtgtactggttggctgatattaaatatttaatattaaaaaaagaaaaatggaggttaaaaatgaacagcaattcagactgggctcttaactatgctaaacagggcttttctgtcgtccctactaacccaagtaatgtaaaaatacccgcgatagaacacgcaggaaaaccaccgctaactcaggaagaaataaaacagctatggactgaagaacctaattatggcattgctctaaaaatgactaatatttttagcattgacgtagatactccacagcatgcaggaacaactaaaatagacggctttaagtcgttaaaagagtgcatcccgtcagaatggttaccagatacgttaaacgcatttaccccaagcggtgggatgcacttttattatatgaaagtaaacggcttgcctaataaatcaggtgcagcaatcatccctggcgtagacgttcaagcatcccctaatagtatctctgtagtaccaccaactaagcgccaagatggaatttatgaatggaatctagtacctgggtctaaaaatcccgttgctattccacctagagaattaattgattttattcaagagaaaacaaaccaaaacgcatcaaagcctattctttttaaaacattcaaagctaaaaattacgcaggcaagttattagacgctttatgctttcaacaagtcaagggacaacgtaatagctatttaacttcattaattggcaaaatgctattctgtggtgctgaagaagaaaactgctacacccttgcaatgtttgccaatagtcaatttcaagaaccattaccagaaaaagaagttacttccatttttaacagcatattaaggaaggaactagctaatgaaaaataaaaaagtaaaaatgaataaagaaacaaaagagctaattaattctcacaagaaacaaaaagaaaaagcgcctaaattgccagcttggtgttatgtagatgacaatggcaatataaaggtcaatattggatcactcggcgaattaatacagaaagaacgcaattacttattcattactaataaggataaggaaacactttacgaatataattataagcttggttattggttacctatctctaaaggatcaatttcaaaagctattcatgataaattaacgtcggttggtaaatggacgtcacaaaatcaaagaaaaacctatgaatttataaatagtggtattccaagaaaacagttccaagatacaatcggacactcgccagaaatggcatttaattttcttaacggcgtttacaactggtcaacgggcaaattagaaccccataataaaaaatattactttgagggatgcaccagctacccactagacatggcaaacaatcaaacttctgaaactaataaatattttaagttgcttttaggcgaaaatgctaaaaccatgatggaatttattggttactcattttacccaagttatgaacctattcaatgcatcgtgatattgaagaatgaaggtggagacggtaaaacttggtttacaaaccatgttataaataaaatgcttggaataaataatgtttctaatattagtttaaatcaattagcggacgtaaaaaataacaaattcaaaccagcggaactatttcacaaatatgtaaatgtttccagcgaattgagtgaaagcgaaagctcattattacctactgactctttaaaaaagttatctggtaatgactatataaatgtagataataaaggacaacgtgacacacgctttcaaaattacgcaaagttattaattataactaacacccttgttcattttagagatgatagtgatggctttagtcgtcgtgtttatattatgccagctcataaaataccagactttgaaaacactatagatgttaggaaaatggaggcagaacgtggagcatttgcgtataagtgcatcgaattagctaaagacgcaatgaagcgcaagcctgttaaagggaaaagataccttactaaaaccaacagtattagccgactagtaaacaactggatgctagacaatgacccagtgcaacagtttattaatgattgcgttaccaaagcacaaggtaaaagagaaaaagcgctagatgtaattcaagcttggaaaaattggtgtagtgataacgattataagccgttaggcaaaaccaactttaaaaataaaatgattaaaaagggttttaattatcatgaagagagaaaacgcggttcagatggcaagcaactaccgagaaagtattattttactaatatgacgcttaacgaaaatgctaacccagagggaaaaataaacccagttactaataactatgactttaataaatagaaaaaaactgaaaaattggatttatgccactttttaaaatcgggttgagccctaggggctgtaataatatgccacttatccactttttttattaataaaaattaaaaatataaatatatataatacacataatatatatttattacgtaaaaatatattacacagaaacccaatggaaagaaaaaaagtggcttttcagcgcatcccttgtggctctaagcatgaacccacttttaaaaactggatcaaactggaacataaccactttttgcaattaatttaaggaatttacagaatgaaacaagatagattaaaatacgagcttaaaaaatacctaaatagtaaactgacctacccactacacactgtggaagatattagcatagaaagaatattaaaggtttatggcagcgaaaagcctagcggttatgtaattcaactaataataactgggcaagtaggtacaatacgaaaggataaatagaatggtagacaaaaatcttgaacataccgtgttctttcacagcatggacagcttgaacgaatggcaaagaaaatactacaaaaagataattattactgaacgcatggagacagctaataacgattacttaattactttctttttaaatcggaaacatttaagcgtaaagcctagctataccgaccagcttatgaatattgcactggatgcgcaaactatagactactatcacaacggagttaacatagtagatttactttaacgctggtattataatatagacatacatccatataagaagagatcagtagcttaattgtctggctgctggtctttttttgttcgctctcatccctaccagatggcttatattagcttgctggctaggctaattgcggttctcttatgatttatcatttacacctgtggaggtctcacgctggcttatatgcttgtctgcttggtcttctggctgtcctgtcttttcgtttttgctttctctttcactggtttcatgccttgagtttcagcaagctcagctaaagaatttaaattagcaactaattaattaagaaagctagccgtccatacaatggctctctcagcatatcgagggatgcgtacgagcgtagttacaactacagacatgctagcactaatagattattcatacctgtctgctttatggtcactcaatgtaaccgccgaaataactcgttatcaatctaattgatttagaaaattaaaccgcaatcaaaaataagcaatgaatgaatttaatttcactcactgtttttttattttgcaccccgccctacctttcaacgttgcagagccacacattgctgtcgcctcgtgtgaaacatcagttgtttcacaattaattgagggggggttatttataaaccttattactacagtatttatatatgtattcctgctatttctagacggaaaaaaaaggctattcaaacctttctggaatgaataaccttgactgaattgattcttactagtttttattatgccgcttctttatattcgtgcaagtctagaacatcttttacaccctgttttaactgttccatcagataaacatcggcaaactgcaagagcgcccttttacgcaatacattatattgagtgtgaccatatccaaggcaattagcaatgtcccagctagctaaatgcttaatatatctaagctctagaatgctcctgtatggcttagttggttcattggtgcaattgcctatggctggctttaaacacgctagacggtcgttatatgcaattattaagttatatctgctcgccactgcatcgggattaattgaactatttaccttgatattatcaaaattcaagccgtggacgttgtaccgaccagcgcacattgtctcataccattctaaatccttagcaaaaaatttctccacgtttttaactgtttctggttcattgatttctagcatacctagcaactcctatatttatatattattggaatatctaacataattatattttactatgttttactagctggcttattaactgcaaaataaaagagctaccttaaaaaggcaactcaagccgactaattaaatatctaaaatcaaccaatcaatacgctattacacttttaagaatatgaagcctaatatgaagcccgaaaatactattttttattaatttgatttaatcatagaaaacaaaaagcctttaatatcaacgtttctaatccattgacattaaagacttttaaatttatggagatgaggggaattgaacccctgtccaaacgtattccgtcgttaacctctacgatcatagttatattacttaaacttcgctttgataaaacgccatataacagggctaaactatcaaaactaacctaagaatcttatttctaactattaaggtaagtagttaaacgtagctcgttaaatggtaagacccgcagacagacacgagcaatccgtcattggatcacgcagcctgactaagcagctactgcgtaagaattttcgttatttgcagttataatttaactgtgacgttttaacgtagacgtgacctacgaatcgcagtcaacgcgaatctacgcctgtcgaatcccaaaacatccccagatgtttcaatgatatcacagtcactgttaaaatgctataactttgctttcacagctatttatctaatttagctaaacgaacaacgtcacgtgcaatcattaactcttcatttgttggaacgatcatcgcagtaatctttgatttcggtgtagtgataattccttccttgttagctttattagctttttcgtcatattcaagaccaagccaagtaagaccatccataatctgttttcttacacttgcatcatgttcaccgattcctgcagtaaagactaaaacatctaagccacccatttcagtcatataagccccaatatagcgaacaattcggttaataaaaatgtcttttgtaagtttagcctgtttatcaccatttttaattgctttttcaatgtctctcatatctggggagattcctgaaagaccgagtaaaccagatttagtgtttaacatcttaataatttcattaaagctggtaatgttgccttttttcataataaattgaagcaaggaaggatctacatccccacttctagtactcattgtaattcctgcaaccggactgaatcccattgaagtatcaaaagactttccatctttaatagcagtaactgatgcaccactacctagatgacaaagaaccatcttcaaatcttcaactggcttctttaataagtcagctgtccgacgtgatacatagcgagcagaagtaccatgtgcaccatattttctagcacggaacttttcataatacttatatggtactgaatataagtattgaacaggatctaatgattggtgaaaagaagtatcaaaaacagcaacctcaggaacgttaggtaaaactttcataaaagcatggataccgtcggcttcagctgggttatgcaatggtgcatagtcactcatattataaatcttccaaagattatcatctgtaatgactgtactatcagtaaattcttcaccaccagcaacaacacgatgtcctaccccagcaatatctgctaaagaatcgatcacattgtattctttaagccagctaagcaacttttggactgcttcttcttgattagcaatatcactttgttcatcatgttgactgccatctgctaaagtcattgtgaaaacagatcctggcaaaccaacacggtcagccataccagatgcaattactttttcattatctagagaaaataatttgtatttaaatgatgaactacctgagtttactgctaaaacttttttcattttatatacctctcgtattatataaattaatcttcactcttatgataccagtcatttagtttcatattaaatgctactaaagattctggtttctttaatgaatctaatttagccaccagaacctcacgcttaacagcatgttctccatgattttgaaaaactaaaatagatttttgttgaatctgacttgaaaacatatcatcgggcaaatcgacaattgcctgaatattaacttttttagctaaccaagtcatgaattcagtagatcctttaccagtaaacagtaatctaggtactactaaaaatgcaaaaccatcacgtttaaggttatttactatttgttcaataaataaagtatgagcaaaagaatgtccctcttttgcgtgattttcgaagcgctcagcattattatccaatggataataacctactggcacatcacttaccactatatccgccttttcaatcatccatggatctaaagcatcttgacagtataaatcaatttttaaatcttcaagatgagcaccaatatctgctaaatccaataatgcttcttcattatcaattccaattaatttgtaattgttttgtgaatgattttcctgaatcaactgtctaataaccgaataaagtaaatttccagttccaattgcggggtcaaccacagtttttttacctttagaaacgattctttgccaaattaaagcaattattgtagcaatcactgaaggtgttggcatcaagttatagtcactggcatcttgagtaactgcttttaaagttaatagagtaaatatttgtacttttagagcacgtggcaaattatcataatctaattgacgatactcttcagttaattcagctacagtttctttatctggggcacccgattcgactttgatcttaccattttctagattatcaaaggtttccgttaatgccgatgaaaaagagacattcagagctttttgtaaatgctcaatagccttctgaaactttggatataattcttctactttttgcatttttcttccttctttaatattccttctaatattttataggtatcatcaaatactagcaagcaaacaatgttacttggaaaaataatttattaaagaaagattactttccatattttcagtaaaactatgttgatacatcattacgaaagcaatacaaatattaataagcagtaaactactaattaaggcacttcccttaagtctttttactattatcttttttctcatcctttattttatcttccttcttctctggtaaatctgttttgaaaaacatctcactttgcctaccatctttttcagttactaaaatagtaaaagaatcttttgcagtagaacattttattcttttaacttgaaaaagcagtggcatgtgccctccctcatctgttctcattctcaaaacatcatttgaactcatatcaattacatatgtatcgtaaattaaatcaccattctttttcttcttatccgataactttctaagaacaattttagttggatctgaaccagttgtacttacttcaacatgtccactttcttttaagaaattatttatttgtacataactatacgtaatctcattaactccggttttttggcgattaatttttctaagtgtacctacaagtccaaataatatttgtgcacataaaatagtaactgcgattgcaaacacagcttctaataaggtaaagccctttatctttttcattattcttacctacgatagagatgatcatgcactaataacgtttttttatcactatgtctaaaaatatattccgcatatgccttatctactcgtttttcaatttgtttctcagtctgcctattttgtttaattgtcatccctaaaagcaatactcctagacaagctatcgtaaagcctacacatgcttcccacaaaatgaagccctttatttttctattcttcaaccatcctaccccatgtcatctgtatttttatctttttctctttacttccactcttaacagtaattgttcttggcgatatcgttccgcgattgctaatgtataaattattaaaattataaactctaacatgtcgattcaaatatacttttgatacttgatgtggctccattatctgaattgaagaattattgtcaaaatatgataaaaaatatgacttcttttctactgttgaacggtgtaaatacttatttatagttgatctaatttgacgcgtagtactatccaaaattatttgttccttaatatttttcacgtaaagcgttggcattaacacaagtaaacaaactattgctaaagtaactatcgtttcaactaaagtaaaagcctttattctcttaaaaatcatttttgtggtaatttttcatatctctctttttgtttttgagaaatatattctttctttaccagctcttctaatgaagtaccatctccattatctgcagctaattgtctttgagtctcaaccgttgttcttaaggcttcatctgttttactagttgctctctctttttgcttacttagtcctggaacaattagcaaaatcaacatcgcaataatggcaattacaattaccatttcaactaaggtaaatccttttacccgtttatttttcataataaattgttttaactttttcatttttccctctacattgtttccattaaatgatacattggcattaaaattttcaaatacatccccagaatacaaattccaataaaaataaagcatagtggctgcaaattaacgattaaaccatttaatttgagatttagttcataaaaaagtgtcttgctaagtaatagcgctcttttcccaatttgctctcttgttgttccggtttctaaaagcataactaagttattagaaataaaggcttcattctcaataattgttttaatctcagttcctttttctaactgattcttcacttttgttcctaagacttgctgtaatgagttctttggttgctgatcagtaagttggcaaattttttgtaatgaaaagccgttgattaataaaacagctaagtcagacacgataagatagtgaacatataaatttaatgttggtccaattacaggtatcctagttaatttcttcagtgcataataatcttgcctattaagtagcctgattaccttactaataaaaaatgcacctataataactaacatcacaagtccacccagcattacattactcgtccagtcattatctgacatttctgtctttaaaaaagtttgcatacaaattaatagcgtaaccatcattccaattaaaagtgctggataagctaattctcctcgcagcttctttaactgcttatttttcaagcgaataagtttacttaattggtccaaacaagacaataaattgccatcaataattgccatatttatttgtgcagctaaagtactagaaaatcctacttcatgcaatacatccccaagttgcctaccttcttcaacctgtttacttatataaactaattgattagaatcaccactccatattttaggcagcaattttaaactagcattaagcgaataaccgttaatcagtgcttgtcttaaataatcaataaaaattaattgagcagcgctatttagcttatccttcttcataaagatgcttcgtatcttcactaatctttcctctttcaaccaactgctctaaagcactttgccagttgcgcaaatcatgacgcttatcattagacataatagcttgatcaagtatttttccatatccaatatccattaaacaggcaactttatttcgatcttttatcggtaacaatctttgataagaagcagccgtcaagcaattgcacaattcgtctttagtgattcctaatccttcaagccgtgaaattgtttgtaaagctgtttttgcatgaatagttgctaaaaccaaatgtccacttagagctgcgttaatactgattttggcagtttcttggtctcgaatttctccaataattaaaatatccggtctatgacgtaaagcagcctttagtaaatctgggtaagtaattcccgcaacaagattcacttgtgtttgtaaaaaacttggattccaaacctcgactggatcttcaatagtcattacaacctttttttctccaactaattgcgctaactcatacatggttgaggtctttcctgatcctgtcggaccgctagtcactatcagcccacgttgattggtgagtctttttagcaaatcaaattgttcggggagaaaataattattacttttcccttcataaattaatcgaactactaaagactcatctccttcaaattcccctacacttgagaagcgtaaaaagaccttttcaccccgaaattcagtctgatacgcccccacttgtggtctacgacgctcagatatatccatttgcgcctgaaacttgaaataattaagtaattcctttcctactttctggcttaattcttttattttactcaaacctagggcagttcgaatctttatttcatatcctctaatagcgggaaaaataaagatatcactagcatggctttcaattgctttttctaaaatagcttctgatacttcgttcataattaatccctcctttgccatacacttattagtacgcgaaaataggccatatttttttatcattttaaaaattaagaaaaaaaagactgacacaaaggtcagccataaaaaatagacctaacaaaattaggtctacttcttgataaattattattcatcatcatctgcagcagcagtataaacattagaaacatcatcgttatcttctaatgcatcaattaaatgagtaaattgctcttttttatctgctggaactggagtggtgttttgcggaatcatagttaattcagcgttagctaacttgtagccagctttttctaaagcatcacgtacagcagtaaattgcttaggatcagtgtagatttcgaatgcatcatcactagtttctaaatcatccccaccagcatccataacatcaagtaaaacttggtcttcatcagcatcagtagtggaacgatcaattacgatgtaacccttacggtcaaacatgtaagcaacggaaccagttgcaccgagtgaaccaccattacgagtaaaggcaacacggacatcagaagcagtacggttcttgttatcagttaaagcttcaactaaaactgcaacaccacctggtgcatagccttcataggtaatttcatcataatgttcatctgaattaccttcagccttcttaatagcacgttcaatgttagtcttaggcatgtttgctgcacgtgctttatccataaccatacgtaaagtaggatttcctgaagggtcaggaccaccactctttgcagccatataaatttcacgagataatttttggaaaactttacctctcttagcgtcttgcgcattcttgcggccttgaatattgtgccattttgaatgtcctgacataagaatccttctttctttttatttaatatagttaaccttgtcaatcataacgcactcaaggtttaaattcaatctatgattaattaggaattgcttttttcttgatggtgtctaatccagtaaacaaaaatacagagtaaaatagctaaaagcgctccagctgaatcaagagcaacatcgtgaagacttggggttctatctcctgtcaaatattgatgaaattcatctaatccagctaatccaataattcctaaccagataaacaaaggtccacaccattttttaaataaacgatctaatcctaaacaagcaaataaaccaactaaaaaatacgatgaaaaatgggcaaattttctcatgacaaattgtgtcattccagcttccccattgtctaaaaatgcattatgccagcgaccagcataataaatattccattttccaactattctttcaataatcggaaaatgtcgatgaataaatcctggtgacatctcttgttcgtgataagtcatcgaactggaaataaataaacctaaaagcactaagagcatcaaacagacaaagatcatttctcgcttagttaatactgtttttttcatttttcaactttcctactttcaagttcttcagcaaccaaaacaattatttttttagcaatttcaactttagttgtttctgtaatattttcagttgttttatcttgccttaaaaccatgactttatcttcatcactaccaaatactccatgactgacatcatttgcaacaatcatgtcagcttttttctcttgcaattttttcgaagcattttctaataagttatttgtttcagcagcaaaaccaacaacaacttgattcgctttttttatacttcccatttttttcaaaatatcaggagtttctttcaaataaatttttaactcatccccctgatcctgctttttgattttatgagcaatataatttaccggttcataatctgctacagctgctgccataattaaagcatctgcacctaaaaaagctgtcttaactgctgagagcatctgttctgtagtttctaccttaatgttttttaaactaggcgaattaggtaatgagacagcaatatgacccgaaattaaaatcacctcggctccagcaacaagagcagctttagctaaagctattcccatcttaccacttgaacggttacctaaaaaacgaaccggatcaagcggagatattgttccacctgcagtaattacaatttttttaccagctaatatttgtttagcttgaaaagaatcatctatccaagccataatgttatctggctctggcatccttcccttaccactatatccttcagctaagcgcccagtagcagaatccattaccgcaattccatcttgttttaataaggctagatttctttgaaaggctggattactccacatatgactattcatagctggaactacatatttaggtgaagctgttgctaggaaagttgtacttgccgcatcatcagcaataccatttgcaattttagcaataaaattagccgttgctggaactacaacagcaatttctgtccaatcggctaattcaatgtgctgaatctgatcagctctttctttttcccagagatcagtcaacactggatacttagttaaagcagctaatgtttgcgtaccgattaaatggacagcttcttttgtcataactactcttacttcatgtccctctttttgaaaatttcgtacaacgttaattgctttataggcggcaatactacctgtaatataaactgtagctttcatttttctcaaccttaatttcataatttctttctactataacacaagctaactaagacaaattattaaaaaataaattatcaaattaaaaatcattaacggattctgatatgatttatattgaataaagatatcgatcacataccttgaaaggataaatatacaaaatgaaaaaatattatcaaaagattttttctctttttattgtaatgggggctttatttctagttcttactggctgctccaaaaaagaaaattcatcgtctaacaaaatctcgattgttaccagcaccaatgtttatgctaatattgcacaaaatgttttaggtaagtacggcaaagcaacagccattattactagtagttccaccgatccccacgattttgaaccaactactgcagatgcaaaaaaagttcaagatgccaaaattgttgtagctaatggtttaggatatgattcctggctagcaaaactggctaaatcaagtaataagtctgctgttttagttggtgaagacttaatgaatttgaaaagcggtgataatcctcatatctggtttgacttaaatatgccaacaaaatatgtcaactatttggtaaagcgcttatctaaaattgataaaaaacacgcaaactattataaagagaatggaattaaatatttagcaaaaatcaaaaaagtcaaaaaaatagctgattcaattgatggtacaaaacaaaaaccagtatatgttagtgaaccagtattcgactatgctttgaaagccacccactttaagattggcgataaagattttgaagaggcaatcgaaaatgaaactgatccgagtgccaaaattgttcatcaaatgaatcaaactattaataatcgtggtatctctttctttgttaaaaactcccaagtaagtagttctaccgttaacaatttcgttaaaagagccaaatcaaagaagattccaatcttgcaagttcgtgaaactattccaaacaatacaacttatttgaaatggatgacagaaaattatcaaaatttagcaaatatcgctaaaaagttaaaataattaccaaaaaagaggcatgagcctcttttttattaccctaaaatatcctttaatttgttattaaattgcttaggaatttctgccataattacgtgaccagttggtgacataataaaactatctacttgatcatttttttcttcaagcaacttttcatatccttcacgataatacggactctccttagcaataaaaaaagtaatcggaattgttgcgttttctataacttttcgccaatctaaggacatatgattttctaacaagtccacattatcttttctattaaaggggttttcttcttttgctttcataagtttggcataaacaccatcatctagtcctgcgaaagtttcatgaacatggggtctttcctgacattttttatgataattttcacttgtatagtccataaagccatacttccaattcttatcattaagcatcttaggtgattgatctaccactaatgcacgcttaacaacagttggccatctttttattagacagaaaataatcgaagcgcccattgaatgtcccatgaaaatagcctgtttaattttcagaaaagaaattaattcttctaaatcttgtgttaaacgaacaatattatgtcctctttctgtgcgttggctcttccccatatttcggtggtcataagtaagtacttgataccctaaattattaagaaatggtacttgagcagaccatatttcttgatatgcaccaaaaccatttactaggacaatcgtcttccctttcccagttaattcataattaatttttacattatcacttgtttcaaacagcatttttactccttattctgtttaattctaatgaataaacatccaactgcagcaataatcgcaataatcaaagcttgacttaatccactacttaagcttacgttgatcccgtcataaacgctttgctggagcgagcttgtggcaattccagccgcgtatgataaaacaccatatgaaccaattgcagcaatcataagcggtaaaattgcaatctttttaccaaataaaaccattaccattgccaaaatgtagagaccaattagtaggaaataaatcaaatgataaatctcagctgcttgttttacatccgcagaattctgtcttaattgttcatttactaattgcaatattaactgattaaaaacttgttcttgttgcgtatcattatttagttttagatcagatgcagctaatttaccattggctaaataattagtactcaattgatttagcccttgatatgatgtttttaattcaatattcttgggtaattgtgataaaagcgtatcttcgattcccgattcttgcaaaaaactgactcccatttgtaaatcactattattcgcttggtcaactaccttattaattgagcttttcacaagaccagcagtactatcaactttcaattcaactggacttgttaaagtcaaacttagtgagataaagattaatccaattacaactaatctccaaatccattttattaatttcattttttctcctaacgaaaattttaatagtcttttataatcgctaaaatactacataaagttttttttagtgctatataataaaagtgtaacaaatattaaaggagttcagcatgattgatgaaaaactaaaagaatttttcaataaatttcctcatattaaggaaaataagcctttacaaaatactctgagcaagaaaatcaacaacctaataaaaaaagaaatccaacatggtgcaagtcaagttgaagcggaacagaaagcacttttaaatttaacagatctagacactctattatcacaactaaaaaatttagaagaaactgactacagtaaatataatgatttctttgctaaaatctttgattcaaaattagttaatgaattaaaacttaaattaaatcaaattgatgaaattcaccttaattaccgcttgggtgatattttagtattacccactaattcatcaaacttaattgtgcatgattttatgtctagagatattgaaaatcttcattcaacggtcgaaaaaattggtaacgtcttaaaaattactcaaggtccacgtaagctggtaggaattttcaaaaataaaactttattatttttacctaaaaattttactggcttcctaacaatcagaagtcaaagtggtgatatctatattaataaagttccaaattattgtatgctggatgttactgcagtttctggcaatttattattggctcattctaaacttaaacgtgttcaagcagacttaaagtcaggcgacattgctgtttctaatacatctgcaaatgtatttcacattaatgctcattctggaattctaactagcgatcatgtttgtgcaaaagaagagatttcttatcatacaagtagtggaaatatagacttagaaagtatttctactaaaaacttttttatcgatactaagagtggaaaaattactattaatgaccttaatagcgaaagaatggatttagttactgatacaggaaatatgagcttaaataaggttaacggtagcggtgatattaagtctggaattgggaaaatatccttatcaattgctgataaatctaattttaatttttcaatcacaagtaaagttggaagtatccgcgtaaatgtaccaaagaaagaattatttaaattcaaaatcaatactaaaaaaatcggccctactgatcttccacttgactccattatttatggtaataatgaatatgatgaaattgaaggatatgttggtaatgaaaattcaagtaactcactaacgatcacaagtgaaattggaaaagtatcaattaagaacgaaaattaaacaacttcaagcgaaaatgctagcaaacctaaaatttgctagcattttttctaaattattaagcctgctttatatcctgcaaaaactaaaattaagccgccaccataggataataaagcataaagaaggaatgttttgtaattatgatcctgccaatgagaaagcaactcaacatttaatgtggaaaaggtcgtataacctcccagtaccccggttccaactaaagcataaacaaatggcgaaaaattgcgcgaaaaaactagccctaacaaaaatgccccagtaagatttattaataaagtagcataaggaaagttgctagaccaatgttttttaccataattagtaattccgtacctaagaattgctccccaaattgctccaaaaccagctgttacaagtgtcgttatcatgctcttattgccaactttctacccaatatttttcctgtaatcattcctaaataagcaaataaaaatccaataaagattgaactaaagaaatatatcagcgcctgattattcattccgctttctaattgcttgaatgtatccaaatggaaactagaaaaggttgtaaatgctcctacaaaacctgtacttaatcctgtaactagccaatctcgtccttccctaaattcaataaagaaatatgttagaaaggctaataaaaagcaaccaataatattagctacaaaagttccagcctgtgaccaaatcacatttaaataagcacgtaatgctcctccacaaaatgcaaataaaccaacactgatataatttttcaactttttattcattaaaaatcaaccttcttattgcatacgcaattccatcttcattatttgttcgagtaacataattagctcgcttctttatctctaataccgcgtttcccatagctactttataaaaatctggaacgtcaaacatggaaatatcattcttttgatcaccaaaaatcattatttcatcttgtctaagattaagtttctgcgccaattcttttaaagcgtttccttttgaagcttgcttagaattaatttcgattaatgttttatcagaggtagaaacgttatatttttcaataacttctttgggcaggtgccgataaactctttccatttctgatggagcacctgaaaacatggcttttgtaaattttaaatctttagctatatctttaaatccacaaacctcaatcgacattctagtcagccagctttcacacgataaataataattaataaagtgatctaatgtaataaatttatcactcacttcaatatgaaagttagccttcaattgttgagctattttttcaaaaaaaaggaaatcttgataacttaataattcttcaactactgcatttccttgtgcattcaaaactagagcaccattaaaagccacaacatattgattaggatcttgcagatctaactgatctaaatactctttaattcctggaaatggtcgccccgaacaaggaacaattttaattcctaatcgagatgctttttgtaaagcttcccttgttttaacacttatttcttgtttatcattcaataaagttccatcaaggtcaacggcaattaattttgtcttcatcaattttctcctatgtaatcgttcactttcctttctattatacaaaaaaagacgacactactcccttattacacataagaaagtaggcgtcgtcagatcttaatcggttaaattggtgaacgccatcacctattataatttaataaaaacagtttactttgagcacatctcttcttcaacgaccttagcaacttcttcacaatacccatcagctaattcttgtgttggtgcttcagtcataacacggagtaagctttgagttccagatggacgaacaaaaatccgtccttcatcgctcaactcttcctctacctttttaatagcttcggtaattcgcttatgttctttccagtctttcttatctttgacaggaacattgattaagcgttgtggatattctttaaagtcgcttaataattcacttaatgacttaccagtatccttcattacgtataataaatgcaatccggtaagcattccatcaccagtattatgatagtcactgataataacgtgaccagattgttcaccgcctagattataaccattagctctcatttcttctgaaacataacggtcaccaacttgagttctgacattcttaaggccgcgtctttctaaagccttagtaaagcctaagttactcattacagttgtaacaatcgtatctttctttaaacggccatgatcggcaagataggaaccaattacatacataatatggtcgccatcaacttcattaccgttttcatcaacagcgatacaacgatcagcatccccatcgaatgctaagcccagttgagcaccttgctttacaacttcttcttgtaactttttagtatgagttgcacctacatgatcattaatatttaagccattgggatgagttgcgattgtagtaaaatcaacgcccatatcagcaaataatcttgaaatcaaagcactagctgcaccatttgcaccatctacaacaactttaattccacctaattcttcaggtaaagtattttcaataaattgcaagtactttgaagcaccttcgtggtaattagttacagtacctaagccttcagctgaaggacgtggaagcttatcttctggtgcatcaattaatttttcaatttcttcttctttagcatcagatagtttcaaaccatcactaccaaagaacttaattccattatcttcaactggattatgagatgctgaaatttgaaccccagcatctgcaccttgagcacgaactaagtaagaaaggcccggtgttgtaatcacaccaacttctaaaacttcaattccgacggaaagtaaaccagaaatcaatgcatactctaacatttgtccagaaatacgagtatcgcgtgaaactaatactttcgctctttctccatcttttttatcttttgtaagaacatatcctccatcacgacctaatttaaaagccatttctggagttaagccagcattagcaaccccccgtacaccatctgttccaaaatatttaagcataatttaacaacctttccttgttttattcttttttagcagtagtatcagttaccttaatatgaactggtattactgatggtgaagccttaactacgcccttcggcaatttaattgttacatcttttgtaacatctcgattgataccacttaaatcaacttttaagggaagagatgttatcttctttagcgtattctcatcaccatatatctcaactgtctctacttttgcggttaatgagtaaacatgagttgatgattcatttttggacgtcacgtttattttaaccttctttttcgacaagttaattgggatagtaatgtgcgctgttgctggatcaatagcaacattgagttgatgtccctctttatcaagtgctaccagcatttcttcacgctcaaatgtgctgtctattccctttggtaaatttgcgtgagctacaacacgatcaacttggttaacctcgctcttagcgccagtaatgttcacaacttctggatcactctttgctgtgccaagattatacccatgagatacagcactcttattatactctatttgcacaggaagggtacgagattttctcttttgaatgtttacacgtactttacttggactcacactataagttaattgagtacttaaaccatttaccttaattggcaccgtatgttctccagtttttaaatggcttaaatcaatataaacacggaaattttgagtattaatagtagaagtaaccagcgcatttgatccttctaaagtaagatttattttttcaggataaccagttacataatatttatccgtattaacagaaacttgtagaggagctttaattacttgcgtcttagttgcagttttcaaagtttcttctcgacgtccttgagttacaaatccctgttgattagacgaaacataaatagccagtaaaattgccaatatcaatgcaacaatgcgatagaaccaaggtttatcaaaaaactttttcattttttatttgacccccaattccaaacatggtttacaattcgttgataccatttcggcttttcttcttcttcctttggaactagttgagcatttaagtacttcaaatactcttctctagtcaaatcaagcataaactggctattacgagtaattgttaccccaccagtttcttcagatacaacaattgtaatcgcatcagtaacttctgaaatacctaccgcagcccggtgacgagttccaagttttttaggaatcatactattatctgaaagtggtaaatacgcagcagcaactgcaatccgattatttctaataattactgcaccatcatgcaatggagtgttaggaataaagatgttgattaataactcgccagtaatatctgcatcaattggaatacctgtttcaatataatcctctaaaccagtattttgctgaattgtaattaaagcaccgattcttcttttggacatatattgaatcgccttatctagttctccaatcattttttcagcggcctgtttttcagtcatagttgtgccaccaaaaattggcgatcttcctaaatgttcaagtccacgtctaatttctggttgaaaaataacgattattccaattacagaccatgaaagaatttgatcaacgaaatacgttagtgtatgtaagtgcaataaaccggctataattctaactatgataattagtgatattcctttaactaattgaacagccttggttcctcttaccaacataattaagcgataaataatataccaaacaatcagaatatcaataatattcattaaattttgccaagtaaatatttgctcgatgttaaatttcactacccatccctcctaaaccttaattatacctaaactactgtcttatcgaccatacattttaaattcaagaaatagatcattatattcctgaattttcttaggacctaaatcctgatagacttgtaaatttttcattgcttgtttacttggataaaattgcttatcgttttttatctctttaggtaataatttttgagctttgatatttggcgttgcataaccaatatactccgcattttgagcagcattttttggatcaagcatgaaattaataaaagcatatgctcctgctttatttttgacagtgcgaggaataacaaaattatcaaaccacaagtttgaaccttctggtggaaccacataatgtaaatgcttattatcacttaacattgtccgcgcttcgccagaccatgttacaccaactgctgcctcattctgaatcatatacatttttagctcatcagaaataatcgcttttacattgggacctaatccatctaatttagttttagctaatttaagatctaatgaattagtagtatttaacgactttcccatcgatgctaatgaaagtcccataatatctctagcagaatcaactaataaaatattatgacgatacttttttgaccaaagatcgttccagtgctttatttgtcccggttttacaaacttatcattatatacaattcctaaagttccccaaaaatacgggactgaataagtattcttaggatcaaatgagtgatgcaaaaattcactcccaatatttttataatttggaatttttttggtatcaattttctcaagtaacttagcctttcgcattttcgaaatcatgtaatccgaaggaacacaaatatcgtaagcggtgcctccttgctttatcttcgtatacatagcttcattagaatcaaaagtttcataaattacatgatagccagtttgcttttcgaatttttttatcaatttaggatcaatataatcaccccaattataaataattaaattcttattattggcgctaacaccgctattatctaactgcttagcccaagcctctaatcccaagcaaactgctagaatagcaaaaattccaatcaataactttttcattgtgcacgccccttaccgatatgggatttatgattagtaattacataataaattaataccaaaaccattacgaagataaacattaaggtacttaaagcattaatttctaaattaataccctgccgtgcgcgtgaatatatttctacagataatgttgaaaaaccatttccagtcacaaaaaaagtaactgcaaaatcatctaatgaataagtcaaagccataaaaaagccagcgagaattcctggtgtaatagctggaatcattactttactataaacttgccaagtagaagcacctaaatctctagcagcatcgaccaaagagtaatcaaactcctttaaacgcggcaaaaccattaagacaacaatcggaatcgaaaatgcaatatgacttaataatactgaaccaaagcccaaaccaattcctaaaaaagtaaaaaagattaaaaagctggcaccaataattacatctggtgaaaccatcaaaacgttatttaacgctaataatgttttttggccttttttatttttagtctgactaattgcaattgctccaaaagttccaattactgttgcaatcaaactagataagagagctaataagattgtttctaaaaaaatggctagtagtcgattatcgttaaataagtcttgataatgactcaaagtaaatttttcaaaatgatccatattatgaccactcgaaaaagaataatatattaaataaaaaataggtaaatacatcgaaacaaggacaaaagcaaaataaatccgagaccattttatttttttcatagcttgatctcctttttacgacgatgatcagacgaagtaaatagcataacaattaccatcaatactattaatacaactccaattgtcgatcccattgaccaattcatcgtagtcataaaatattcttcaattgcagtaccaagcgtaattactctgtttccgccaatcaatcttgtcaacatgaataaagaaagtgacggaataaatactgcttgaattcccgactcaactccagatttagaaagtggccataaaaccttaataaacgtttgccacttacttgctcctaaatcataagcagcttgaattacagccggattaatatcacaaattgcattataaattggcaaaatcataaatggaatttcaatataagctgctacaaaaataaaagcaaaatcagtaaataaaatattcgctggagcgatgccaaaaagccttaaaaagttatttagtaatccatgtttgccgaagattccaataaatgcatacgcttttaaaagtaaattaatccaagtaggtagaataatcaaaagcagccaaaattgctgatttttcatttgacttaaaatatatgcaattgggtaggaaatcaacaacgtaattaaggtaattaaaaacgcataccaaaaggaatttagcgtcattctcaaaaaagttccattgacaaaaaactgctggaaatttttcaaggtaaatccatcatcacctttaaaggcattaatagtaattaaaataatcggagcaatcacaaataaactaagccaaagtacatagggtacaagaaaaaatagcctgctctttttcatatcttactcgtctccttcatatgcctctaagcgtttatcaaattctgcttcgctttcaccaaaacgcatcacatgaatatcttcaggatcaaaatatactcctacttcttttccaatattagttggattagttgagtgaatcagccattcattttcatcactatcaatggctttaatttcaaaatgatcacccaaaaagagctgactttcaaccataactcttaattttccatgctcaatatcagtaatatctagatcttctggtcttaaaacaacttctactttttctcctggtttaattccagcgtcagcacattcaaaacgatgattaccaaattctacttcataatctttaatcattcttccactcagaatatttgaatcacctataaagcgagctacgaaatcattaactggctcatcgtaaatatcaactggacttccgctttgttggatttttccttcatttaaaacaaaaatctcatcactcatagctaaagcttcttcttgatcatgagtaacaaaaataaatgtaatccccagtttcttttgaatttcacgtaattcaaattgcatgtcttttcttaaacgcttatctaaagccgataaagactcgtctaaaagtagaacttttggctgattaacaattgctcttgcaattgcaacacgttgctgttgtccaccacttaattcagaaatttcgcgatttgcaaagccatctaactgaaccatatgcagagcttctttaacggccgattttatttcttgcttatcctttttctttatttgcaagccaaaagctacattttcaaaaacattcatatgcggaaataaagcataattctgaaaaaccgtattaatttttctcttggctgcatctaagttagtaatatcttttccatcaaaaaatacttgaccacttgttggttcactaaatccagcaattattcttaaaatagtggtctttcctgaccctgatggtcctagcaatgaatagaattttcctgattcaatcgtcaaattaatatcttttagagccacaaaaccatcatcatactctttacgtacatgcgttaatttaataatatcgctcaactttttcaccatctcatcaaaaaagctacaagccgttacttgtagctttgtcgtagtatctaatctttttcttttcctataattcttacttcagtctgcaaatcaacatcaaaatcttttttgattgttttttgaattaaatgaattaaatctaaataatcagtagccgtagcaccaccaacattaacaataaagccagcatgcttctttgaatcttccgctccaccaattctttttccttgaagaccagctttaattatcattgggcctacaaaatgacctgttggacgtttaaagacacttccacaagaaggatattcaagtggttgctttgctctacgtaagccattgaagtattccattttagccttaattgcccacttatctcctggttcaagtccaaaagtagcactaattacaatatctccagtttcctgaactagtgaatgacgatagccaaattccatttcatcgtgagtataagttttaaatttgccttcacgagttaagacccgaacagatttaatgacaaattccgtctcgccgccataagcaccagcattcatgaagacggctccgccgacgctgcccgggattcctgctgcaaactctaagccacttaaactagcttcacaggctgcttcagacgtatcgataattctcgctccagcatccgcagtaactgttgcttcttcttgatttgcaacaattttatccattttagtaagaattaaaactagacccgcaattcctccatctctaataattaagttagaagcatttccaataacagttaaaggtaagttattagttttaactgtttccactaagatttttaattcttctaaatttttaggaaaagcaagatattgcgcaggcccaccggtcttagtaaacgtaaagcggctcaatggaatattttcttgaatatcaattccctgttttttcaaatccatcagttgcattttcaatctctcttttccttaaataatcgtccctttaatcataccgcaataaatagctagttttctaccttaagtgttatactaaaaagaaaaataataatttatttagaggataaaaatgaactttactgcaatggattttgaaacggcaaacagtcatcctgaaagtgcatgttctcttgccttagttatggttagaaacaatgaaattgtcgaccgtttttatacagttattaatccgcaaatgccttttgatagtcgaaatatcagagttcatggtattactgccgaagacgttaaaaatgcaccaacaatggctgaggtttggcctaaaattaaaaaattatatcagccgggaatgttagtagctgctcataatgcacgttttgactgccgggtgatggaaaagtcacttgctcgctataatattccagcccctcactactttgcaattgatactttagcaactagcaaagcatttgaacccaatcttcctaatcacaaattagacacagtttcagaagctttagatatcaacttatggcatcaccataacgctttaagtgacagtgaagcttgcgcaggaattttaattgaagaaaataaacgtgttggggatgatccaatcaaaaaaatggttaagcaaatttaagcttaaccattttttattattcaaaagatttttttatatctgataaccagacttggtttctctcaccaacagttttaaattcaactattcgtttggttgaatcccacgaatcatcaacacgcttaatcgttaattcaagataatcatttggcagatcatcaataataaattgtggccattcaattaccactaatccatcttctgctagatatccaggcatatcaatacttgataaatcaccatcttctagtcgatacatatccatatgaaaaagtggcattttaccttcacgatactctctaacaattgtaaatgttggactttttacaggacgtctaatacctaatgaccgagcaattcctttagtcaaagtggtctttccagcacctaaatcgccagataagaggagcagatcatgcccctggctattttttccaattgcctggcctaatttttgcatttgttcatcagaatttatttctaatgattccattttacttctccatatttgcttgagcagcagttaaaatagctaacaagtatacatcttctgttttacatccacgtgataagtcattaattggagcagctaatccctgcaatacaggtccaattgcactaaagccacctaaacgctcagcaactttatatgaaatattacccgattgaagttctggaaaaatgaaaacattagcatgtccagcaactgcagaacctggagcttttgcttctcctactcgtggaacaacagcagcatcaaactgtaattcaccatcgcaaactaaatctggatacttttgatgtactaaatctgttgcatcttgaactttagttaccatcggtccctttgctgatcccttagttgaaaaactaagcattgcaattttaggatcaagcccaaccatttcagctgttttactggattggtaagcaatttcagctaatgtctcactatcaggatcaatattaattgcacaatccgcaaatatatatttttcgtctttgcgttccataatcatagcgccagaaacacggctcattccttttttagttttaataatctgcaaagctgggcgaaccgtattagctgttgaatgagtagcaccggaaaccattccgtcagcctttccttcatacactaacattgtgccaaaatatgaaacatcttgtagaatttcctttgcttctgccaaagtattctttccttttcttaattcaacaaaatcttggcacattttttcaaaatctgaatagacagctggattaattatctcaattgaacctagatcaacatttaatttctcagcagattttattacttcatcaggttttcctaacaaaagtggttcaacaattccctcttctgcgagacgaacagcagctttaattattcgctcatcatttccttcaggaaaaacaatcactttttttgattcttctgcttttttcttaagtgagtcaaatactttcataacaaattaagcctttctttttatctctagctaatattttacaatttcaatgctttttctcaaaacaaaaactatgccatatctgattgacttacttcctgtggcaattgccaatcaattggactctcaccaaatttagtcaaggcatcattacatctagaaaacggacgagagccaaagaaaccacggtctgctgaaaaaggactagggtgtgcagacttgataattacgttcttttcttcatcaattaaaggaattttattttgggcaaatcttccccacaaaataaatacaacttttccgcgatcactaagagctttaatagctgcatcagtgactatttcccagccttttccctgatgaccattagcatttccataaggcactgttaatactgcattaagcaataaaactccttgatccgcccactttttcaaatagccatgatttactgggatggcaccaacatcatcatataattctttatagatattttttaacgatggtggcaaagcaaccccaggattaacgctgaaactcatccctgtggcttggccagggttatggtaaggatcttgacctaagatcacaaccttcgtatctgcaaaagaagttaacttaaaagcagtaaaaatgtgatacatatctggaaaaatctgctttgttcgatattcactttttagaaaatcatgtaatttttgatactgttcactctcaaaagcgggtgccaaaatttcatcccaatcatttccaattaattttttcatatttattctatcctcttgtatctctaagaaatccaagttcatgatatcatatagataaaagatcggaggacttaaaatgattaaacttattgcaagcgatatggatggcacactattaaataaacaaatgcagatttcttctgaaaatatttctgctattaaagaagcacaagctaaaggaatcgaatttttagtagcaactggacgagcaccttctgaatctcaaggaatactggctaaagctggacttcacactggcttcattaacttaaatggcgcaatggtttttaatacagaaggtaaactaattgtaaacgagccaattcctaaagaagagagtttcaagattaataagttacttaaagattctggcttctactttgaaatagtaggagcagatcatgtttattctgattctcgtttgcgaaggatcgctaatttttctgatcttttagttgatcttaataaaaaactgacttttaaaaaagcagtttcttttgctgctggctccgacgaaataatgaaaatcaaatacgtccctgattttaaagacctgcttaaaaagccatcatttgaagcaatgaaatttgttgcttttcatccagatggacccaaagtttttaatcatattcgccaagaaattaaaaaaatcggcgatttaattgttactgcaagctcttcaactaatattgaaataaataatattaaggctcaaaaaggaattgccttaatggattacgcaaaactgcagggctatcagcctgatgaagtgatggctattggtgacaatcttaatgatgaatcaatgattcgaatggctggtattggtgttgcaatggaaaacgccgcacctgagatcaaagaaattgctaattttatcactaaaactaataatgaaaatggcgttgcgtatgcaattcgtcatttctgtaaataaacataattttccctaaaggcagatgaaattatgcgttatactgtccaacttactcaaggccaaacttgtggtcaaatcccagttaaaaatcaacagggcgagattgtctatattttaaaaggaaatcttaatgagtttaatcaaccaatcattctcactgatattaatcatattgagattggtcggctttatttagactctaatcttcttctaactagttatagtgttgacgtagtcaaccactccctagtcaaagttaaaaaaataaatagtcgatttgcaaatttattctatattactagattaaactattggataaaaggaagtttaaaacaaggtagatatagtttttattcaggcattaaaaaagtggctagcgtctgttcgctagtcactgatgctggacttacttggagttgtgatatttcacgtcccgaagatgtcccatttattattttaattagcctgctctttacacaatggcatactaagcctttattcttaccaacttttaattttcaaaatcgagttaacgctctctcttagtcggaatttaaatagtagtgtgagaaattaaagacttgaaatttatgagaacaaatttgtttttgaaaatctatcaattcaataataattgctaattcttccaataagaagctatagcttttattacatccgtggctaatccaaaaacaaattcgatcatataataagttggtcaattgtttaagtatgagttctgaaaaacttcctcttttataaacataagatcgaatatactgaaagaaatgttctttcatcttttcacacatacaatcttgttcacttaaatgataagcattataaaaatactgtttgtttttctgaatgtattcacataaaacattaagaagttgatttagactttcttttttgtttttgcgtaactcttttcttaattcaaacaaaatacaggcttcgatacagttatttatctttccatatcgcaagtaaaaagtttttcgactaatttttgctttactacaaagtttcgaaatatttactttctttacatttggttcagataacatactatgtaaagttatttgaactctttccaattctgccaacatctcatttttatttcctttctagaaaaaggatcacgctacctttctatgaatgacagttttattactttatcaggttttatcaatctagacaatagtaataatgtaaatagtgttatttttaaatatttctttaaatttaataatcaaaaaagagaattaatctacttcacctatgattaattctctttttgtttaattaacttttttaaccatgtgattatacagacgatctccaatagtcatggtcgaagtcgtttcaaaacccatataatcatacaaacgagctgctctagggttatcttgatcaacgttcaaacttatctttttatatcccttctgcttagcaacgcccggagcaaatttaattaatcgctgtccgatcccttctccccaatgttttggagaaactgcaatagcatcaagataccattcatgcggtaatgcttctttatctgaaaagatgatcgcatcaagaggtaatccaactttaggataggaactttttaatgaaatatcaattagcccttgatcatcataaccatacattacaatcaacccaattggacgatccatttcatctgtttctacccacattcgattatgagaatatcgataatgaggtgaatagaaaccatgcttcatcaaatcatagaattgactttctgggagtgctttaatggtatccatatccatttcatcaaaaatttgttttaaaattggaaaaactaacggaaaatcagttaattttgcctttctaatcattttacctacctacttaaattccatacttacgatgaatttctcgatcttgatcacgttttttaattgtttgtcgcttatcgtattgcttctttccctgaccaacacctattagtactttagcaaaaccatgtttcaaataaacttttaaaggaataattgccatcccttgttgagcctgaattccagctaggcgagcaatttctcttttatgaagcaacaagcgccgtgatctcaaaggatcatgattatagcgattaccttctttatactcactaatatgaacattctctaaaaaagcagacccattaattatttgaacatatccatcacgtaaattaattctgcgagcacgaattgatttaatctcagtaccagttaaagcaattcctgcttcaagagtttctttaataaaatagtcatgatttgcctttttattctgagcaatcaaattatctgctttttgtttcatcgttttcttcctagttattttttattagctttaacagttgtattcttacgatggcgaattttaaaactatgaccattatttacatggaaagagttattattcttaccattattgtttctacgtcccctattaaaactgcgcttaccacgactataacctttttgtggacgttttgtggcatttggatcataaatttcaaagtctaattgatgttgctcaacatctgcattgatcaacttaactttaattggcattcctatcttaaattgcttgtgcgaattacgacctgttaaagtcaatgacttttcatcaaagttgtaataatcatcatttaagttagaaatatgaatcaaaccttcaacagtatttggcaattgaataaacatcccgaagctagttactgatgaaacaatagcatcaaaagtttgaccaactttatcagccataaattcggtcatcttcaaatcatttacgccacgttcagtatcaattgactttctttcttgtgttgaagtttgttcagcaacatcaggaagttgtgacttgaaatgcttctgcatatccttatccatcttcttatctgcatattcatgaatcattcggtggaccattaagtcagaataacgacggattggagaagtaaagtgagtataatatttagctgctaaaccgaagtgaccaagtggttctggagaataatgcgcttgtttcaaactacgaagcatcatcatttgcacaactgcttcttcaggtgtaccttcagtcttagctacaactttctgtaaatcttttggttttacatcatttggatcagcttttacatttaaaccaaacgcacttacaaactcaaagaatgattgcatcttttcttggtctggagtttcgtgaacacgataaagaaatggaacatgtttcttgtaataatcttcagctactgtttcattcgccattaacataaatgattcaatcatcttttcagcagtaccacgttcatgaagaacaatatcaattggcttacctttatcatcaacaataatctttgcttctggttcttcgaaatcaattgctccgcgttggtgacgctgtttatataaaatactgtgtaaatcagccatgtcgtgaagcattggagcaacgtcttcatatttttgctctagcttttcatgattatttggatcaagaactttattaacattgttatatgttaaacgaccatgtgacttcataactgatggatatattctatatccaacacgcttaccttctggtgtaatctccatatcacatgaaagaaccaaacgttcaacgccttcattaagcgaacaaatgccgtttgataatctgaatggaagcattggaataacacgatcaactaaatatgtactattaccacgagcaaaagcttctttatctaacggacttccttcttttacataatgagacacatctgcaatatgtacacctaagtgataattaccattaggaagcttccaaactactacagcatcatcaaagtctttagaatcgtccccatcaattgtcacagcaggttgatcagtaatatcaacacgttttgctttttcttcttctgttacatgatctggaatattattcgcttgatccatagcatcttcaggccaatcagttcgaatatcattgtcaactacaattgacatgatatcaacaccaggatcattcttattaccaatagttaaaagagctacaccttgcatttcatcaggttgatcttcgtcagggtacttggtaatagaaatttttaccatatcacccatttgtggtttaacaccattatcagtgatattaatcttatacttctttaatttacgattttcactaactacataaccataaaatccacttgattttactacttcatcagcatatggatgaaattcgccaactaaagtttcaactcctcgttcggtaatctcctcaattttaccctcgggtcctctaccattccatggatttgcacctgcaatgatctttaccttaacatggtctccatcaattgcaaacttggtattatgtttatcaatgaaggcatcttccatgctttcatcatcaaacttaacaaaaccaaaccccttatcattagctttaaatgtaccttcagcaaccgtatttaattgattcaactgatattttccttgaccatcagttacaatctttttactatgctctaaaaaagttaaagctttaactaaatctggaaaatttaatctttgattacggctgagatcattttcaagttgatctacatcatattgctcttgaggattatgtctgaaagtttcataaacatcagctaaaactcgttcattttgtgtcattatctaatttgcctcaatttctttataagataagttaagctaaaagaaattaaaaagccctcctatgaccggaaggctttttttacttggatgaaagtattgccaagatcaaagcaagagcgaaaaagagaaccaacaatacagcggtaattctttccattaatgcttcaaatccacgcttctttgtctggccactaaatactgcaccgccggacaatgcgtttaaggcatcttgttgcttttgcggctgcatcaatgtagcaataataattaaaaagctaacaatgatgagtagcgtcatgacgatattatacaaagcgctgcctccattacctaaatttcttactgtactgattttaccatatttaactaacgaatgctaaaagaaaaagggagccacctcaagcgacacccatttttcttttactttaagtattaattaaaattgtttatgtaaattgtaaaaactgtgaattcccttgtattgagcagttgaacccaaagcttcttcaattctcattaattggttgtacttagcaattctgtcagttcttgacattgaaccagtcttaatttgaccagcatttgttgcaacaactaaatcagcaattgtagtatcttcagtttcaccagaacggtgagaaacaacagcagtgtatcctgcttccttagccatttcgatagcttcaaaagtttcagtcaaagtaccaatttggttaagtttaattaagattgagttagcaacacccatcttgatacctttttcaaggtaactagtgttagtaacaaataaatcatcaccaacaatttgtaccttattgcctaaacgttcagtaaaggtcttccaaccttcccaatcgttttcgtctaaaggatcttctacagaaataactgggtacttatcaactaaatcttcaatcaatgaagtccattcttcagcagtgtattcacggccatcagcaacagttacatacttcttagtatccttgttgtagaattcagaagcagcacagtcaaaggcaatagcaatgtcttgacctggcttgtagcctgcacgttgaatagcttctactaaaatttcaaatggttcttcgttattcttcaagttaggtgcaaaaccaccttcatcacctacggcagttgattcaccacgttcttgcaataagcccttcaaagtatggaaagtttctgcacccatacgaacagcttcatgaagtgatttagcaccaactggcataatcatgaattcttgaatatcaacattgttatctgcgtgcttaccaccattgataacattcatcattggagttggtaaaacatgagcatttggtccacctaagtattcgtataaaggtaaacctaattcatcagctgcagcgcgagcacttgctaatgaaacagataatattgcattagcacctaaacgacctttatttggagtaccatcaagatcgatcatagtttgatcgattaaacgttgatcagtaacatctaaaccgataacagctttagcaatttcgccgttaacattttcaacagcagttaaaacgccttgaccaccaaagcgagatttgtcaccatcacgtaattctacggcttcatgttcaccagtagaagctccagatggaacaatagcacgaccaaagccgcctaattcagtataaacttctgcttcaacagttggattaccacgagagtcaagaacttcacgtgcgtgaatatcagtaataacagacatggagattctcctttttctaattccgtttaaataaattgttaattaatcttggtagtttactaatgctaagaatgattctggatcaagtgaagcaccaccaactaagccaccatcaatgtcaggcttagacattaattctttaacgttagctggttttactgaaccaccgtattgaatacgaacgttttcagcagtttcttcgttgtacaagtcttttacagtttcacgaatagtcttgcacatttcttccgcttgatcagcagaagcagtcttaccagtaccaatagcccaaattggttcataagcaataacaagcttagaaacttgttctgcagttaaaccatctaaagcagctttgatttgagcaactacccaatcttcttgcttattagcttcacgagtttcaagagattcaccacagcaaataattggagttacgccattagcaaataaagctttagcctttttgttaatgtcttcatcagtttcgtggaagtagccacgacgttctgagtgaccaataatacagtagtcaatacccatttcgtttaaaactttaggtgaagtttcaccagtaaatgcaccttcaacttcaaagtatgcattttctgcaccagtatgtaaatctgagccttcggcagccttctttaaaacgtaaagatcaactgcaggtgcagcaataactgattcaactttacttggatctggtaacttgcccttaactgcatttacaaattcaacagtttgttctgggttcatatgtaatttccagttaccagcaataattggtgtacgcatttaaaaattcctcctaattttacttgtcagaaacacaagcgattcctggtaattctttaccttcaaggtagttaagtgaagcaccaccaccagtagaaatgtggctgatcttaggagcaattcccaattgcttagcagcagcagttgagtcaccaccaccgataatagtaacggcatctttcaaatcagctaatgcacgaccaacttccaaggtaccttctgcgtagtttggcatttcgaatgcacccataggtccgttccatacgacggtcttagcatcctttaagatgtctctaaatttctcaacagtcttaggaccaatgtcaagtcccatttcgttatcaggaatatcatcaccaacaacttcgtgaggtgcatcgtttgagaattcagttgctgcgacattatctacaggcaatacaatcttatcgccagcttttgctaataattcttttgcaagttcaactttatcagcttcaaataatgatttaccaatcttgtggccttgtgcagctaagaatgtgtaagccataccaccaccaattaaaatgtgatctgacttaggaattaagttttcaataacaccaatcttgtctgatacttttgcaccgccaaggatagttacaaatgggtgaactgggttttcaacagcatcacctaagaacttgatttctttttcaagtaagaaaccagctgctgcaggtttaccagccttcttcatagcagttgcgatacctacatttgaagcgtgacttctgtgagcagtaccaaatgcatcgtttacaaatacatcgccaagacttgcccagtattcgccaagttttggatcgttcttagattcacgtttaccaaagtcattgtcaatatcttggaatctagtgttttcaagaacaataacgtcgccatctttcattttatcgatggtttcttcaacttctttaccttcattttctggtacaaaagttacaggcttctttaataactcacttaagcgttctgctactggacgtaatgataattccttcttgtcagcatctgactttacacggcctaagtgactgagtaagattgctttaccaccatgttcaataatgtacttaatagttggcaatgcagcaacgatacggttgtcatcaccaataacaccatttttaattggaacattaaagtcaacacgaactaaaacttttttacctttaagatcaaggtctgaaacgattaatttagccatttaaattaatttacctccgatagattatttgaaaaaaggcggaggaagtaattccctccgccttctctcgtctgcttactaaaatcagtaattaaattaatgattaaagaatagcaaatttcaataaagtacgaaccatttggcaagtgaatgagtattcgttgtcgtaccaagcaacagtcttaactaattgcttgtcacctgcagtagttaccatggtttgagttgggtcaaagattgaaccagcagtcatacctaaaacgtcgctagaaacgatgttgtggtcgttgtatgcaaatgaaggactttcgtacttcttaactgcttcgttaacttcgtcagcagttacatccttgcttaagattgaaactaattcagttacagaaccatctggaactggaacacgttgtgcgtgaccattcaacttaccgttcaattctggaacaacaagaccaatagccttagcagcaccagttgagtgaggaataatgttgatagctgcagcacgagcagaacgtaagttaccaccacgtacaggaccatctaaaagcatttgagttgaagtgtaagcgtggatagtagtcatagtaccaacttcaatgccgaattccttttgtaaagcattaaccattggtgctaatgagttagtagtacatgaaccagctgaaacaatcttgtcgtcagcagtcaaagtatcatcgtttacgccgtaaacaatggtcttcaagtctgaaccagcaggtgcagaaattaatacacgctttgcaccagccttaaggtgagcttctgacttagctttgctagtgtagaaaccagtacattcaagaacgaagtcaacaccatcgttcttaacccaaggaatgttttgtgcttgtggttcagcgtaaacacggtacttcttaccgtcaactacgattgagtcatcagttgctgaaacttcgtggttgaaagtaccatgagttgagtcgtacttaagtaagtgagctaaaagtgctggagtagtcaagtcgttgattgcaacaacttcaatatctgaagacttttcgcctaaatccataatacgacggaatgctaaacgaccaatacggccgaaaccgttaataccaattttaactgtcatatcctatattcctccttaggaaatatgtaagtaacaatttattttaaacgggaattacttcccctttaaaaccaagtttgaggctccttcatccgtgatcaaccacgtctgttttggagcatgatgcatgtaagctacaattgccgccgccttgctggcaccagcagcaattgcaaatacatgaggtattttatctaagtcctctagttgaagaccaatacgagggatacgtttaacaagtctaccttgtcggtcgaagaaatacccgaaacattcagccacagctccatcatttcggagcttagaattagtcataacatcaagcccacgtctctttgacatgacatctgctctaccaattccatgtatcaccatatcactattataaatgtttgaaatcgcattcgcaatatctgtgtcttgaagtaataaagtcaaggcttcagatgatacattttctggaagatataggcctttgtgcctgcctcccgtttcagatgccatcatctgagctacagtattgctttgaatttcaacactttctccaactgctccccttccaggaacaaacaataaatcgcgatagcgacttaatttaggagaaagatgacgagctactccagcaactgtagtaccacctaatacggtaataatactttttcctagcggtaaaagaagatctagagcagaattaagttgttcgcccatcaaatcaactacacgctcttgacgatccatatcacctggaacaataattgctcgatcaatacccaatttctgtgccaattcaatttcagtttgacttgcattgaataaacgatcaattaatggagcggcttcttttaaagttctctttcctttatcagttaattccatcccatagctctgaatattgatcagacctaactgtcgtaaataatcagtttcagttcgcacattgcgctcgcttaatcctaattttttagcaacaactcgtcgcccaactggagctaacagcgaaatctgttcaagaacaagaaaacgttgccgaattatttttaaaacatcaggaactaagctttgcaacaaggttaaatccgagtccattgctcgctccctctattgggtcaaaattgataccgctacatgacggttggcgacccaaaaagcttaaaaatattagagagacgcgaattgattaacttcagattcacatttctctctcgacattttttagtatagcaatatctttttttaaattcaagatatatccttcagaataattaatttgtactttcttctttttttgatatacttattttagtttgtcgtgcccttagtgtaatggatcgcacgtaagattccggttcttaaaatctgagttcgactctcagggggcgcatagtacaagacagtcagtcaatctggctgtcttttttgtattttttcactttatttagaaaaaatctatcatctgtaagcattttcgttataattaaatttggcgttaattatgtacatagacagaaaggttattttatgatcgaagaagaaaaaaagtctaatgcccaaaaaatgctctggccaacgctagcgatgatggcattttcaactgtttggggcttcggtaacgttgttaacgggtatgtttacttcgacggtaccaaagttgtattcagttggatattaatgttcctactatactttgttccctatgcattaatggttggagaactaggtgcaacctttaaaaatgctaatggtggtgtttcctcatgggttaatgccactatgggtgccaagtgggcttattatgcaggttggacatattgggcctgccacgtagtatatatttcaagtaaaggtactggtggtttaagagccatggcgtggggaatctttggcaacactaaatggtacgatggtcttccaactgcttggactcaattcgctactttagtagtcttcctctttttctgctgggttactactaaaggtattccagtacttaaaagtttggctactatcgctggatcatcaatgtttattatgtcaattttattcattattatgatgtttgctgcaccagcaattaacccacatgcaggatattattcaatcaattttaattggaagagtttaatgccaacattcaaccttaaatatttaacatctctttcaatcttagtttttgctgttggtggatgtgagaaaatatctccttatgtaaacaaggttaaaaatccaaccaaaaactttccaaaagcaatgatggctttagcaattatggttatggtttctgcaattttaggaacttttgctatggctttaatgtttgatcctaaagttgttaacagtaatctaaatgaatatatttcaaacggtgcatacatggcctttcaacgtttaggagaatattaccatgttggtggtttgtttatgtatatttattcatggtgtaacgttattggtcaattctctactttagttatcagtattgatgctcctttaagaatgctactaggtagtaaagaagccaaaaacttcattcctaagaaacttcttaagataaataaacatggtgcttacatcaatggtatctggatggttgtaattctttcagggggtttaattgcagcacaagctttattgcctgatgcacaagcggttatggctcaattagttaaattaaattcaactacaatgccaatgcgttatttatgggtcttcgcagcatatattgcacttagaaagcaacaaaagaagtttgatacttcttaccaaatgaccaagaatcaaggactggcttacacagctggaatatggtgttttattgttacagcagcatgttgtattttaggaatctactcaccagatccatttaccctattccttaacatcattactccaattatcttgattgttttaggcttaattttgccagcaatcaaaaaaagagaagatggcactaacccattaatgaagtaacttcaaatgagcgatatgattgtcatatcgctcattttttctacataaaattaagtttgattagttgacatgattaaaagtaagtgatttaattagcactgtacttatcagagtgctaattttgtttaggaggtaaaattaatgctcgtacctacagttattgaacaaactgcacgtggtgaacgtgcttacgacatttactcaagattattaaaagatagaatcattatgcttagcggtgagattaacgaccaaatggccaactcaatcatcgctcaacttttattcttagatgcacaagacaatactaaagatatttctctatacattaactctccaggtggtgttattacctctggtcttgcaattatggacacaatgaactttattaagtcagatgtatctacaattgcaatcggtatggctgcttcaatggcttcaattcttttaactagcggaactaagggtaaacgttttgcattaccaaattcaacagttcttattcaccaacctttaggtggtgcacaaggtcaacaaacagacattcaaattgcagctaatgaaatcttgaagagtcgtaagaagcttaaccaaattctacatgaaactactggtcaacctcttgataagattcttaaagatactgaacgtgataattacttatctgcagaagaagctaaagactatggtctaattgatgaaattttggttaaccaaaagaaagattagtttaatttaacaaaaaatagagctcacatctgtcgtgagctctattttttttgactaattttcttcttttagctgttgtgccatttcacgaattttttgaaaacggtggttaactcctgactttgaaattggaccatctggtacttgagctgcaacttctttgagtgaaagttcaggatgcgtcagcctaaaatgtgctaagattgctaatttttctggtaaattttctaacccaacttttttctcaattagttgaatatcctcaacctgcttagctgctgcattcgcagtctttttcaaatttgctgtatcgcaatttactaatcgattcactgaattacgcatatctcgcataattcttaagtcttcaaatgctagcattgcattgacggcacctacaatatgtagaaaatcaccaattttttcagcctctttcaaatatacaatatatccattacgtcttttcgtagcttttgcatttaaataaaagaaactattcattaactttagtaaatcattattatgattttcataaagagaataaatctctaaatgatatcgactcgtttcaggattattcacacttccagctgctaagaaagctcctcttaaataagacattgccctttgttctgaggtcataatcttctcaggaattccggtaatcaagccattatcactgtcaaatatctctaaatcgcttaaaatttcatgaacttgtttttgaagtctaactaaatattgataatttttctttaacttcattttcttagaaacaattaacagtggctcgattccataagcagttttaattaaagaaaatattcttcttgcaatagctggattttcagttgtgatatctagactaaattgatgatcatgaagactaagtaccccgttcattcgcaaaaaagccgctagttctgccttagcatgttctggatgaactggcagactagtaagttctttttttacatcacttgcgtatgaaaccattaactaatcctgttccttttttctgcggcaatatgcttcaaaagccaaattcaaaatttcatcggctacttttttaccatcatgaaaaactaatccactatgctgatcaataaagtcagctgtaattacgcggcaatcttgagcccgtaatccagcgaaatcatttcttaccggttcaagataggcatcataatcggctggattaaacttactcatgtcaattttagccccattaaccaaggccgtattaatatagtgaccacctaaatgatcattaataacttgaacgtgttccgctgccgtgaaatgatctgtttcaccttgttgcgtcatgatattacagatataaatcacttcagccttagtttgtctcacagcatcccctaaattagaaatcatcaaattaggtaaaattgaagtaaataagctacctggccctaaaactactgcgtccgcttgcataattgcggctaaaactggcaaaactgctttcggctcatcgtcagaatcggtatcagttacccatacacgttttatgcgcttatcctttgaagtgatttctgtttcaccagcttcagttgttccgtcaataaattctgcatttaaagttaaaggctcatttgaagcagggaaaattcgaccatcaattcgcatcattcttgataatgattgaacagcatcaaaaatattcccctgcatttcatccaaagcagcaataattaaatttccaatcgcatgccctgcaaaaaatgagtcagacgaattaaagcgatattgaaaaatatctttttcttcctgtggtaagtcagataaggaaactaacacatttctaatgtcgcctggtggcaccacattaatataatctctaattgcacctgatgatccaccatcgtctgccacagttacaatagctgttatatcggcattttgttcttttaaagcattcaaaataacaggtaaccctgttccaccaccaataacaacaatcttagggcgacgtccgcgaatgacacgtacaattttattttctccgtacgccatctcccaacaatctcctttattgtccaatataacgactaatttctcgatgggaaatatcaacaggatatttcttagctaaatcaactgctaattggcgagcaattgaaacacttcggtgttgaccaccagtacatccaattgcaatagtcaatttttcttttccttccgcaatatatcccggaatagccgtttctaacatgtctaaaaatttagcataaaactttttagtttctttcttgctcattacataatcaaaaactcggcgatctaaaccagtaaatggtttgagttgaggaatgtagaatggattaggtaaaaatctaacatccattacaatatcggcatcaattggaataccatacttaaagccgaaactcattacttcaattgaaaaagttcgagtttgattatctccaaacttatctactaatttagcctttaattccttagtagttaaacgggaggtatcaatgattatattagaaatatttttggttcttgataaaatagctctttcttcttgaattccatcaagtaggcggcctgtatgagctaatggtggcaaacgtcttgtttccttataccgagatactaatacatcatctgaagcgtctaaaaacaagacagtcgactgaacattttgactatcttctaaagacttaatttcatcaaccaaatctttataaaaactttttactcttaagtcaacaacaactgctgccttactaaagtctgaagaattgttaattaattcccagaaacttcccaataattctggtggcaaattgtctaccacaaaatatcccatatcttctaaagctttgattgccacagttttacctgcaccactcatacccgtaacaattaataattgtttcttctgttcagccatagctatccctccttaatcgctattataacataccgggtgtttcattttttgaataaaaataaaaagtcgttgtcacaagtagttatcaaactcagctacttcaaaaacgactttttatttttatctatgcatccatgaaacaaaaatttcattgattccaaagaccattaaccaaaatgctaccaagtaaaccaaagtaatagcagcaagcactgggttaaataacaaggcaaaagcgatgatcaagctaataatgttcaaaattaagcagagaacaaaataaccagttgaatattcccgcaagtgccatgaaaagataattccaataattgaatcggctaagaaccaaatagcaaataaaatagctaaagttaatccaccaatttcacgtgaacataagaataaaactccgattacaatatcgacaattgctgaaattagtgttacccagctcaaatcaaaaatgttatggaattttacatatgcggaaatccaaataattccttgtaaaattgataaaataccaaatacaaatacaaatgctgttagaccacgacctgggtagcgtaatagtaaaaatgatgcaacaacaaacaaaattcctgctataaatgagccccaatcaaagccttggtgtctagaattataaatatcgttcatttttatttcctcccagataatattctacacttaatttactaaaacaccattaactttattcctgatcacccttgctattcattagctttttagttaacttagtatctcgctcaagaactggctttaagtattgtcctgtataactttctttaacctcagcaacttcttctggagtaccagtagccacaacttgaccaccgccatctccaccttcagggcctaaatcaattaaccagtcggcatttttaataacatctaaattatgttcaataattaaaacagtatttccttcatcaactaagcgctgcaagacttctaataaacgtttaatatcatccgtatgcaatcccgttgttggttcatctaaaatataaaaattattacccgtggaaagcttttgtaattcagaagctaatttcattctctgcgcttctccaccagataaagttgtagctgactgcccaagttttacataacccagaccaacatcaacgattgtttgtagcttacgatgaattttgggaatattttcaaagaatttgcaagcttcattaattgtcatattcaaaacttgtgagatatttttttcacgataagttacctcaagagtttccgaattatatcttgtaccatgacaaacttcacaaggtacataaacatcaggtaaaaaattcatctcgattttaataatcccatcgccgtgacaagcttcgcatcttccacccttaacgttaaaagaaaatctagctttcgtatatccacgcatttttgcttcattagtttgtgcaaataaagctcgaatatcatcaaatacactggtataagttgcaggattactacgtggtgttcggccaatagggctttgatcaatatcgataattttttcgatatttttatatcctttaatagacttgtattttcctggtttagcagaattattattcaatttttgcgctagagcacgtttcaaaatcaaatttacaagagttgattttccagaacctgaaacgccggtcaccacgataaatttgcctagaggaaaatctactgaaatgtccttcaaattattttcagcagcaccagtaacagtaattttcttaccattaccctttcttctttctagcggtacaggaacaatttttttacctgataaatattgtccagttaaagatttaggattcttcatcacttcttcaggcgtcccggcagccattacttttccaccatacgctcctgctcctggtcccatatcaactaagtaatctgcttgtttcatagtctcatcgtcatgttcaactacaattaaagaattaccaagatccctcatctttttaagagaagaaataaggcggtcgttatctcgttgatgaagaccaattgatggctcatctaaaatatacataacgccagataaattggagccaatttgggtggctaatctaattctttgtgcttctccacctgacaaagttccagcagaacgagataaagttagataatctaaaccaacattttttaagaaagtcaatctatcccgtacttctttcaaaattggttttgctatcattttttcttgctcgcttaattttactgaattaaagaatttaagcgacttagaaattgacagatctgaagcttccgcaatatctttgccattaacttttactgctaatgccttttcatttaatcgcttaccgtgacaagttgaacaagtaagttcggtcatgtacttacccattacatcacgcataaattttgacattgggtgatgataacggcgactgatattatttaaaattccttcaaattcttgaacagtatcatttacaccaaagtcaccttcaagatgaaatttgattttctttcccttagatccatttaaaatcaaatctttttgtcttttagtcaattttttgtatggcttgtctatcggtattttcaaagctttacatgcttgctcaagcatagccgtataatattttgaattagaccatggtgctaaagctccctctgccaaagttttatccttatcaggaataactaaatcttcatcaactgacaatttcattcctaatccatcacaatcaggacaagctccaaaaggcgcattaaacgaaaataaacgtggttccatttcgccaacagtaaaaccacatacaggacaggcataatattctgaaaaattaatacgtttacctttaatcacatcaacatccatgtagccatctgctaaacgaagagcagcttcaacggaatcaaataaacggcttcgaatattttctttaacaattaaacggtcaacaacaatatcaatactgtgtcgtttatttttatctaggtcaaaatcatcagtaatttcatgcatttcaccgtctacaattacacgaacataacccgcgcgttggattcgtttaaagacttccttatgttctcctcttttagcacgaataaccggagctaaaatctgaattctacttctttcgggtagatccattactcgatctaccatctgatccacgctttgcctctcaatcaaagtcccatcatttggacaaattggatgaccaacgcgtgcccacaataaacgtaaatagtcattaatttctgttacagttccaaccgttgaacgcggattatgagatgttgtcttttgatcaatagaaattgcgggatttaagccatcaattgaatcaacatcagccttatccatttgacctaaaaactgtctagcataacttgacagtgactcaacatatcttcttcttccttcagcatataaagtatcgaaagctaatgaactttttccagatccagataagccggtaataactactaatttatcttttgggatcgataaatttatatcttttaaattatgttcacgcgctccatgaattacgattttatcatttaccatttagctttcctcctctactttttcttttcatgtacctgcttttgtaaatccataattgcatcacgtaagttagctgcttcttcaaaatctagtttcttcgcagcttcttgcatttgggcagttaaagttttaatcatagtttgcttttgtttcttagttaattcatcaaagtttagatcagcaaaactctctttattttccttttcatcactatctttagtaattgaaatgacatccctgataggtttaacaatagtcttaggtgtaattccatgttccttgttaaacttcatctgcaaactacgtcttctttctgtagcatcaattgcttctcgcatcgaatccgtaattgagtctgcatacataatcaccttaccatttgagtttctggcagcacgaccaatcgtttgaactaaaggtctagttgagcgtaaaaatccttccttatctgcatctaaaattgcaactaaagacacttccggcacatcaattccttctcgcaaaagattaattccaattaaaacgtcaaatttgccaagtcttaagtccctaataatctctagacgttctaatgtcttgatatctgagtgtaaatagcggactttaattccaagatctttcaaataatcggtcaaatcttctgccatttttttagttaaagttgtcacaaaaacacgttcattacggtcaattcgcttattaatctcaccaactaaatcgtcaatttgtcctttaattggtctaacttcaatctctggatcaagcaatccagtaggacgaataatttgttccactttatgatcagtctgattcaattcatagtctccgggagttgctgagacatacattatctgatttacatgcttttcaaattcttctaattttagtggtcgattatctagcgctgaaggtaatctaaaaccataatcaatcaaagtttgcttacgagctctgtctccgttatacatcgcctttaattctggcatggtagcatgtgattcatcaattaagattagaaaatcatcaggaaagaaatcaagtaaagtatgcggaggttgcccagctttccgcccttccatatgcctagaatagttttcgattccgttagtgtagccaacttcactcatcatttccatatcataggtggttctttgcttaattcgttgagcttctagaagcttaccttccccttcaaattttttgacctgaatattcatttcatctttaattgaagccaaagccctttgcataatttgttcattagtaacaaagtgcgttgctgggaaaatagaaacttgttcacgttcaccaattacctcaccagttaaggaatccacttcaacaatccgatcaatttcatcgccaaaaaattcaactctaaacgcatgatcagaataaccagcagggaaaatctctaccacatctccgcggactctaaaacggctacgttgaaaatcaatatcattgcgatcatattgaatattcactaaatcccgcaataatacatcacggctaatttcttgaccttcagagatagatactacactagctgcatattctctaggatcacctaaaccataaatacaagacactgacgcaacaacaattacatcatttcttgacattaaatcactagtagttttatgacgtaactggtcaatttcatcattgattgatgaatccttctcaatatatgtgtccgactgtggtacataagcttcaggctgataataatcatagtaagatacaaaataatcaacggcatttttagggaaaaactctttaaattcaccataaagctgtccaacaagagttttattatgcgaaattaccaaagtaggtttatttaatttggcaattacattcgccatagtaaaagttttaccagttcctgtagcaccctctaaaatctgcgccttttcaccttgttcaaaaccatcagtcaactttttaattgcttgctcttgatcacctgctggttgaaacttagagacaagttcaaatttcttgtttttttgtcgtctaatcattttcgatcctccgcaaaaaaagttggactaaaatagcccaacttctattaacgtatttattttactacagcgaacgtattttcgcactatttttgcattactttaataaatttgctaatgcatcttgatattcttcagctgctttttctgcagtttcaatatccttcttatttacaccaacataagccttaattacaggttcagttcctgatggacgaagagcaacccaagtttcatcatctaagaagtactttaagacattagatttaggaaatccagttaatggtgtcttcttatcgccttcaatggtttcttgagtttcaaagtcttggatcttaacaactttggcaccattaatttcagttaagtgttctttacgcaatttactcattaattcagccatcttcttttggccaccaatacctggcatttcaatggccttggtgatttcgtaagctacaccatacttttgccaaatttcttgcaagccatcaaaaacagtcatgcctttagatgcatagtaacttgccacttctgcaaacatcaatgcaccttgcatagcatctttgtctctggcaaatggtttgaataagtaaccgtaactttcttcaaagcccattaagaatttaccgtcattttctttattcatgcggtcaacttcttcaccaatgtacttgaatccagttaagacatgcttggtcttaatcccaaagtcatcagcgatcttaaatggaagtgcactagaaactactgaagttactaattcataatcaggtgataaagttccgttttctttcatgtgaactaataagtagtatgccattaaagtagcaatttgattaccagttaaaacttggaaatcaccatctgattttctaacagcagcacccattctatcagcatctgggtcggttgcaataataacatttgcatctacttcattagctaacttaaagcctggttcaaacacatcacggtattcaggatttggcttaatagttgtaggaaattcaggatcaataattgattgacttggaactggaattacattatcaaaaccgccttgtctgaatgcgcgatcgtagagcatcttaccagtaccatgcaatggagtataaataatctttagcttatcagcgttagctttaaccatttcaggatcaacagtaacatccttcaaatgagctaagtaagcttcatccacatcttcaccaattaattgtaatgtaccattagcacgtaattcttctactggagcagctttaacaccaaaaatatcatcaactttttgagcgtaagcaaacaaacgatcggcgttttctggagccatttgagcaccatcttcaccatataccttgtagccgttatattgcttagcattatgcgaagcagtgatattaattccagcaaaagtatttaaatgacgaacagcaaatgacaattcaggggttggtcttaaatcatcaaataagtaaacatgaattccatgtgcacctaaaatacgagcagcatgctcagcaaactcccttgagtgataacgtgaatcaaaagaaattgcgacaccacgttttttagcttcttcaccattttcgtcaattaatctggcaagaccttcggttactcttcccacagtaaacaagttaattctgttagtacctggttcaagccggcctctcatcccagcagtaccaaaattaatatcttgtccgaaagcatcttcaatccacttttcatctttacctaatttgtctaattgatcttttaaataatcaggtaaattatttgcattagtccattgactataaatttcttttgcgttcataatttcctctttacgtaaattttatggtttcatctgctattttaacgcaagttataatgaaattgctatcataattaacaatttaattattctgctcgcaaaagatctaacactccttttctattcaatattaaaaaaatatcctatcaatattaaaaaaatatcctattaactaaagttccagttaatctttcgctcaaactcttcataaggaagtagagtgatttcacctaagtttattccctctgctggtggacattgtgcttctaaagtaattccgtcatattgaccaatattatttgcaataccagtatgattaaagtggttagctgtataggtgacaattgcaggagcattagttgtcataaccattttatgtttatcagatgttaaaattgctgctggttgcatcccatttaagataaaaggatgatctaagccattgcgtaatttaatttgactatcatcactacctaaagtttcagctatttttttaccttggcgaaaatcaaaaacagtattttcaacactttgcattccttgatttggtagtccatctttacccactggtaaatagtagtcggctgcaagttgcaagtttaaatcagttgctttttcacccaaattaaaataggtatggtttgctggattaaaaatagtcaattgatcactaaccgcttcaagcttatatgacacattatttttattatcaagtttgtaagttacatgcaatttcatattgccaggatagccattgtccccatctgaatcaaaaaggaaaaggtcagcttgagactcctgatcagaattttttaatttaaaattccaaaccttcatatcagtaccaataccaccatgaatatgattttctccatcatttttaggtagttgataaatatgatttccatgcttccattgtcctaaacgaacacggccacaaattcggccaactgttccacctagaaaatttctttcttttgaataatcttctggactatttaatgacaaaatcatattttcgctattaagtagaactttttctaaagttgctccgtaattaagaagcttaactttcatcccatgatcattttctaggctaatctcgcataggtcttgcccatcttttacaccatattttataaaacttgttttcactttatttgtctacctcgctcactaaagccttagtaaagctttgccaaccagcttctccatctttattatttttaaagacaccagcgcattcaagaacttgatcaaacacttcaactaaagcctgttgcaatatgctatttacattctctctagtaatctgatgctctgctttaattttcttagcccactcaagatggctatcagctatttcattatcttcattaagtaaatattttttaacttcttctagttctttcttaagtcttcctggtagaatggcccttcccataacttcgattaagccaatattttctttcttaatgtgccaaagctcagcatgcgggtgaaaaattcctaatggatatttatcactagtattgttatcacgaagaactaaatctaaaacgaaatcttctccttcacgatgcataattggagttactgtatgatgtctagtttcaccatcaaaagctttaatttgacgatcttggtcactatagtgatcccaaaaatcaataatcttactgcccaaatcaattaaatctaaagaatttttactagttaagcgtaaatcactcataggccagtcaactactccagctttaacttctgggtattgatcaaaattaatcacttttttaattttcgccttcatcattggaaagacatgacggccaccttgatagtgctcgtgagcgagcatcgagccaccaacaattggcaaatcagcatttgagccaacaaaatattctggtagttgtttttcaatatctactaaattaattaaagtttgctgattaattatcatcggaatatgcttttgatctaagaaaatacaatgttcattaaagtaagcatatggtgaatactgaaagccccacggacggccaccaatcatcatccgaattattcgtaaattactacgtacattctttccatatccgccaacataaccttcattttcaagacaaagtgcacattgaggatacttattaccagtactatgagctgcagcagcaatcgctttaggatccttttcaggttttgaaagattaatcgtaatttctaattcatgatccttagagctctttcctgaaaagacaatatttttagcgatagcttctttttttacgtaattattatcaacgcaaagcttataaaaccaatcagttgctgtattagcagatttttgcattttttgccagaaaatttcatttacttttgaaggcgttggcgtctttaaatcatataacttatcattcaaaacttcgcgtgaagtattgtcatcagggataattttacgatcaacagccatttgaacaagttgttttactgacgattgttttccatcatattcttgatcatcatcgcctactaaagccttgatcttattaattacatatacacgatctaattctttatatgctccactcgcaatgacttcatctgcaaatttttcaataatcttcatttctgtagccccttaagcttaaattctcttagttccatctacaatttctgcatcatagaagcttgcatcgtaaccaacagcatcacgataaatttttccaacattttgcttaaacttttcagcttcatctttttttacaattgcaatggcactaccaccaaagccgccaccaatcattctggcacccaatacaccatcttgcttccaagctgcttcagctaaagtatcaagttctttaccagttacttcgtagtcgtaatgaagagaaatatgggatgcattgattaaacgtcctagcttttctaaatcattatcttccattgctttagttgctctgatagttctaccattttcactaacagcatgacgagcacgttttaactctgtctcatcgttaattaagtatgaatactcatcaaaagtattgtcgtcaagttcacctaaagccttaatatcaagtttagtttgtagctttgctaaagcattgtgacattcgctaacacgatcattataggcagaatctgctaaagtatgttctttgttagtcgacataataataatttcgtagtcacctaacttaagtggcttatattcatacttcattgtgttgcaatcaaggaaaatagcactatcttttttccccataatgcatgcaaattggtccataattcctgagtttaatcccacgaattcattctcagttttttgacccagtcttgctaaactagggcgatctacatctaaatcaaattcatcctttaaaattatccccattaacatttcaatcgcagcacttgaagataagcctgatcccgatggtaaattagctttaacatataggttaaaaccatgattaatcttttctccatcttctctttgacgaaggtaagtaatcattcctttaaagtaattagcccaaaagcgatcatctttttctactgaatcatcatttaaatcaaattcaacaatatccccatcgacattacctgaataaagacgaactttattatcagtccttgggccataaacaccataaacacctaaactaattgctgctggaaaaacatgaccaccattataatcggtgtgttctccgattacgttaatccgaccaggtgagaaaaagacatcttttcctgcttcaccaaatatttcttgatagtctttcagtaattcatctttattcataatttttacctcgtaaatcaattattttatttgtaatcgttttcattaatgattataaaactatttatcaatttagtaaatatatttactaagtttcataataaaaagtgtattgacctatttcaatacacttagttaaagctctttcttataattaaattagtattcatcgtcacatgaaccttgggtaaatctgagttggttattctcatcagtaaaacagaaatagctaatttgctcaaagcagtttgatcaatattatatgaagtaagcggtggtgaaatatattttgctacttcactattattaatactaataatagcagtgtctttgggaaccctaatccctacctcattaaagtattgtaaaaccccaacacttaaggtatctgaagcaataataaaggcatctggtaagtttttgcctaattttttaactacttcttttgctaattgataaccattctttacactaacaattcctttagcaaaaacttcatttttttctattccttgtgttttacaaaattctgtaaatgtaatttcacgaatatcgcgttgaggttgatggtctaaagtaaagctttcagctccaatatagcctaagtttgtgtatcctcgggcaattaacttcttaattgcatcttgtacagttaattcaagattaggttgaactgaatcaaacaactgtggagctggattaatatcaataaatacaccacttggtaaaacattgtgcaatctctctagttctttatagttaagttcagctgtacctactccaagaaagccctgaaaaagtgaagcttgctttatcaattcatctactttcgtaaataatgttatcttaatttctttttctgcagctactttgctaatggcatcacgtaagaaagaaaaatattcatcctgcagttgctcatttccgtttacacggtaaagcacagcaatttctggtttcagattattaactttattactgttctttttaaaatatcccaattcatttgcaacctttagaattttactttttgtttcagaagtaactgaaagacgtggatcgttacttaataaacgtgatacagttgctggggaaaatccagatttagcagcgatttctttaattgttgtcatatgtccaccacttttctctattcacaaatactttatcacagtcttaagaaatgtgctattactaaattatttactaattaaataaactatttattttcgtgctataatgtaatcgattccaaaaaataattaagtaaaggagcacaccatgcgagtattagttatcggtggggccggttatatcggctctcacgctgttagaaagttaattgaagaaggcaacgatgtcgttgtccttgattctctctacactggccacagaaaggctgttgacaagaaagctaagttttaccaaggcgatattgaagatactaatttagtaagcaagatcttacgtgatgaaaacattgatgctgtaatgcacttcgccgcttactcattagttcctgaatcagttaagaaaccattgaagtactacgacaataacgtttcaggtatgatttctcttctgcaagcaatggacgacgctaaagttaagtacttagtattctcatcttctgctgcaacttatggcattccaaagacattgccaattactgaagatacaccgcttgatccaatcaatccatacggtgaaactaagatgatgatggaaaagattatgcactgggctgacaaggctgacggcattaagtcaattgctctgcgctactttaatgtggctggcgcttcaagcgatggttcaattggtgaagaccatggtcctgaaactcacttaattccaaacatcttaaagagtgctatttctggtgatggcaatttcactatttttggtgacgactatgacactaaagacggtactaatgtccgcgactatgttcaagttgaagacttaattgacgctcacatcttagcacttaagcatgtaatggaaactaacaagtctgatgtctttaacttaggtactgctcaaggttactcaaacttagaaatccttgaagctgctaagaaagttactggcattgacattccttacactattggaccaagaagaggtggagatcctgattccttagttgctgactcaagcaaggctcgtaaagtcttaggctggaagccaaagcatgaaaatgttgacgatgtaatcgcaactgcttggaactggcacaagagccacccaaagggttacgaagataagtaaaggtaatattttataacacacatttttattttacatacacaaaaagctgtctatcaataaattaacgatagacagcttttttttgatttacttttcatttaagccttggtagtaattatatacttcttgaccagcaatacttccctcaccaactgcagttgcaatttgacgaagttctttagcacgaacatcacctaaggcaaaaatgcccttcactttagtacgcatattgttatctgtcaaaatccagccttgttcatctgtaataccaagatctttaaaagcagcagtttgtggttgaataccaacatagataaacaccccagcaaccttaacttctttttcttcaccagtttctttatctttatatttgaccgcagttactttattactatcgccgacaatttcttcagtttgagcattccagataaacttcattttatcgttttcaaaagccttcttttgcaattcggccttggcacgaagttgatcacgacgatgaataacagttacagacttagcagattgagccaaatatagtccctcttgaatagctgagtcaccaccgccaattactgcaacatcttcgtctctaaagaaagcagcatcacaaacagcacaataagatacgccttttccagcatattcttcttctcctgcaacgccaagatgcttatgaactgctccggttgcaataactactgcagccgcttcatattcacctgaatcagtcttaataatcttttgattaccatcctgctcaattttttgtacatcgccataagcaaattcagccccagcgttcatagcagtttgatacatcttctcgcctaattcaggaccttgaatatcaacaaaaccaggataattatcaataccagctgtattattcatctgaccgccataaattccgcgatcaagaatgacaacttttaagttagcccgagcagcatataatgcagcagttaatccaccaggaccagctccaatcacaattacatcataattttttctctcagacatattttcgcctctattcttactttttgtaagtatatattactatgagaaaataaaaattgcaatccttttgcttaaagttgaatttcaggctttggagttcttcccatcatttgtttaatctcatcttcaacatttgcgttttcatatagaacacgataaattgcttcactaattggcatatcaatattcttttcttgagctaattcgtgaacagctttaacagtagtagctccttcaacaacttgtcccatattctctaagacataatctaagctcttaccttcaccaatttgcttacctgcacgccaattacgagagttaactgaagtacaagtaacgatcaaatcaccaataccagacaaacctgagaatgtcattggttttgcgccaaaataatttacgcctaaacgtgtgatttctgctaagccacgtgtcattaaagcagccttagcatcatctccatagccttgtccaactaagataccagcagcaattgcgataacattcttaactgctccacctacttcaacacctactaaatcatcattagtgtaaaaacgaacatagttatttgagaatacttcttggatcttcttagcattctcttcgctagttgaagcacaagcaattgcagtcaaatctttttgagcaacattttcagcatgactaggacctgaaatagctataattttttcactatcatttggataaatttcttcagttaaaatatctgaaattaattttttgcttcctggctcaattcccttagttgcagttactaataaaggagtagcaccacttttatctaatacttttcgtacattcttagcaacaattcgaactgccttagttggtaaaacaaacaaaacaatctccgcaccgtctaatgctttttctaaatctccagtagctggtacattaggattaagtttccaatttttcatataatgagtgtttgtatggtgctcattgatttcctgattaacgctatcaatatttccatacaacactacatcatttccattatcagctaacattgaaccaagaactgaaccccatgatccattacctaaaactgcaatttttgccattttcttacccaaactttctataaaaaatatttctttcaatctctattatacgggtattttaatccactaccagctaaataccatttaggttttataacctttcggcgataaacccaaagaataattgctccaaagaataaaatcaagcttaacgcttgtgaaactcgaatcgtattagcaatatataaactatccgttctcattccttcaacaaagaagcggacagcagcataccaaatcacataactaaaaaaaacttccccccgtttaaacaaatgttttctatgccttaaactcaaaatcaaaattaaaccaactaaatttaaagccgattcatataaataagttggttgataatatgaaccatcaatatacatttgttgaataatgaagtgcggcaaatgtaaactttctaaaaatgataaggtagttttagcaccatgtgcttcctgattcataaaattcccccatcgtgcaattacttgcgcagccatcacaccaggagcaataatatcaagcatcaaaaacgggggaagcattctttgatgacaaaaaactaataacacgattaagccagctatcaaaccgccataaatagcaattccaccattccaaatagcaattatttgatcgggatgttgtgaaaaatatccccactcaaaaactacataatagattcgcgcaccaataaagccaattggaactgcccaaagaaggaaatcaatgaagtcatcaggcataatttgtcttttttttccttcattaattgccattaaagtagcaaccaaaaccccagtagccattaaaatgccataccacttaacctgaatgggccctaaattaaaagctactggatttaaagctaaactcatttcttactttcaccttcgtcttttttcgaattatctgaaattaattcagtaagattttgctcaaatttctgacttgcatcatagcccattttcttagctctaaagttcatcgcagcaacttcaataataattgctagatttcgtccaactttaacaggaaccgttacttgaggtacgtctacttcaaaaatttcacgtgtcttttcattaaagcccaagcgatcatagttagcttttggatcccaattttgcaagcaaattattaattgtatctcagtactatccttaactgcaccagcaccaaaaagattcatcacatcaataattccaattccgcgaatttccattaaatgtttcaaaatcttgggagcttcaccaactacagtcttatcatctttttggtaaacatcaactcgatcgtctgcaattaaacggtgtcctcttttaactaagtctaaggctgtttctgacttaccaacaccagaatttccaataatcaaaacacccatgccgtaaatttctactaaaacaccgtgaatactctttcttggcgctaatttttcatctaaaaactgggtaatcacacttgataaatgcgttgtagccatattgctagaaaaaacagggatcttttctttttcagcagcttcaagcatttcggaaggaattggcagaccacgagacacaataaaacaaggagtctcaggagtagccatcttattaaaaacacgttcacgtaaatcatggtctaaccgtgcactataagaaatttcagttcttcctaaaagctgaatccgatttttaggataaaagtcgaaatatcctgttaattctaaccccggacgtgaaatatctgaagtatcaattaacttttgacttaaatattcttttccttcaataatcttaagtgaaggtacatcttttactaattcgctaactttaactgcttcaaccatttttattgtcctctttatcttctacgtctttgactgaaacatttcgtgctttctttcgcttttgattattgttagtcggctgcactggattatgaataccagaatcagttgaatcttttttattacctgaaaacttagctattaaccaaattatcaaagcaacgattagtgcggccggtaaaagtccaataaagaacttaaacacggaaaataagatactcagaataactaatgcagctaataccaatattaaaatagttacaaatcccataagcttttttccttaacatttagtttggatttttttgacttaaaagccactgtaaatacgcatagataaaatcatctaatttcccatccattacgccattcacgtcacttgtttcaaaattagttcgatggtccttcaccatattataaggatgaaagacatatgaacgaatttgagagccaaaaccaatttctttttgattacctttgagttcttctgtttgtttcttctttttttcctcttctagctggaacaatttggcacgcaacatattcattgcagtttctctattttgcaattgagaacgttgcgcttgtgatgatgtaacaattccagtaggtaagtgagtaattctaacagcacttgaagtcttgttaatatgttgaccacctgcaccgcttgaacgataaacatcaatccttaaatcatctggattaatatcaacttcaatgctctgatcaatctcaggtataacctcaaccgaagcaaaagatgtgtgtcgtcttttagcggaatcaaagggagagattctgactagccggtggacaccattttccgacttaagtaatccaaaagcattcttaccttgaattctgacacttacacttttaactcctgcttcttcaccaggttcataatcttcgatttcaaatttcaaattatgattagctgcatagcgttgatacattcttaaaagcatgtcagcccaatccatggcttctgtaccacctgcaccagggtggatttccattaaagcattatgttggtcatatttatctgataacaataatgataattcataatcatgaaaactttgtgataatgaaaacatttctttagatagttcttcacttaactcgggatctggatcagctttaagtaattctaaggctgtctgagcatcttcaaacttctcttctagtcgtttaaaattttcactcttttctttcatccgattagtttcattaattaaactttgtgcttgttcttgatcatcccaaaaaccaggttctgccattttctgttcattgattgcaataccctcgtttaacgaatcaaagtcaaagagacctcctaaaatgctctaacttaggatttaattcatttaattttgcttggatttcactaatctccatttttatattcctcacatcatctaaatcacttttactttaataatagcaaaaaagagagacattatctgcctccctttattttatcgactaatgttttgtcgtatttgagccttcatgaatagacgggtggcatcaaattcgatatcactgatcatttcttcaaacattctatagcctgcttcttgatattcaactaatggattaagttgtccatatcctctcaaactaatagattgacgtaattgatccatcgcatcaatatgatcagtccagcgttcatctacgacacgcaaaataacaactttttcaaattctagcatttgctcaggatcagccagttgtttttctttttcggcgtaattatcttcggcaatcttgtaaagacgctttttcagttcttcagcacctaagtgcttaatattaagtttcttagtagtttcttcatcagtaatggccgatgaaataaagtctcttaattgatcgttacgccaatcctttttatcaccttgcgtgtacatatcaacttgatgatcgatagttcgtttaatcattggcattaacacaggtttcaatgttttttcttcagaaataacctgcattctttccccatagataatttcacgctgagtacgcataacatcatcatactgcaaggtctgcttacgagtatcatagttattaccttcaacacgtttttgcgctgattcaacttgtttagtgatcatacgtgattcaattactttatcatcatcattatcagaaattcgatcaaggaataattttactcgatccccgccaaagcgcttcattaaatcgtcttctagagaaagataaaatcttgttacaccaggatcaccctgtcgaccagatctaccacgtagctggttatcaatacgacgagattcatgacgttcagtaccaataactgccaagccacctaactcttttacaccaggccctaacttgatatcagtaccacgacctgccatgttagtagcaatagttactgctcctctttgaccagcattcataataatttctgcttctttagcatgattcttggcattcaaaacagcatgtggaataccagcttgatcaagcattttacttaagcgctcagaactttcaatcgccacagtaccaaccaaaacaggttgtcctttagcgtgtcgctccttaatttcctttactacagcttcaaatttagaatctaaagttggatacaaaatatcaggtaaatctttacgagcaattggacggttagttggaatagtaattacttccatgttataaatttcacggaattcttcttcttctgttttagctgtacctgtcatacccgcaagttttttgtacattctaaagaagttctggtaagtaatggttgcttgagtctttgattcttcttgaatcttaactccttctttagcttcgattgcttggtgaagtccatcagaatagcgacgtccttccattacacgtccagtaaaggaatcaacgatcatgacttcgccattttgaactacatagtcaatatcttttaacataatgtagttagctcttaacgcttggtcaatatggtgaactaaaacttgattgtcaatatcatataagttctttaagccgaaatgttcacaagcctttttaattccttgattggtcaaattaatagttttagttggccaatcaatcttgtaatcaccgtgatcttcatcatcatccgcatcatcatcacttttatcttcagttaaagtcttaacaaaacggtctgcacgaatatattcactattagcttgctcagcttgtccagaaataattaaaggtgttctagcttcatcgattaaaattgagtcaacctcatcgataatcgcatagttaagcggacgttgtaccatttgatccttgtagacaaccatgttatctcttaaataatcaaatcctaactcagagttagtggagtaagtaacatcgcagttataagcgtctcgcttttcatcagcagacatagaattaaggtttaaacctacagtcaagccaagccacttatatagttggcccatttcactttcgtcacggcttgataaatattcgttaaccgttacaacatgaacgcctttacctgttaaagcatttaaataaacaggtaaagtagctgttagggttttaccttcaccagtcatcatttctgcaatattaccgtagtgaagtgcaataccaccaatgatctgaacacggaaaggatataatcctaaaactctcttagctccttcacgtgctgttgcaaaagcttctggtaaaagatcgtctaacgtctcgcccttttctaaacgcttacgaaattcaggtgtctttgcttgtaattgttcatcagacaatttctcatattcatctgctaaagattctaccttagttgctaatttttcaaatttttttaattctcttctgtcattgtcataaatttttttaagaatattagccatttaatcggtccttaagtttaaattttgtgcacaaatctaaaataatactatgtaattttaacattaatttggaaaaatgagaaacctactattgcaagaaaaagcctcttaagctaattcactacttaagagactatcaattgataagattattttaattattcgttagtttcaattaagccataacgaccatcatttctgcgatatacaatacttgtaccgttagtatctgcatcttcaaaaacaaagaagtcatgccccaataaatccatttgcaaaactgcttcttctgcattcattggcttcaaatctaagtgcttgttacgaacaatatcaaattccttaggagtcttcttttcttcttctaagtcttcatagaagaagtccttcaatcccttttcacggctctttctattaatacgagtcttgtattttctaatttgacgctctaatttttcagaaacaaagtcaatactcttgtacatatcatcagttgtatcttcagcacgtaaaactaaatatggaagtggaattgtcacttcgaccttagcagtgtggtctgggtaaacttttaaattgatatgagcaatcacatcagaattaatttcgaagtacttttcgagcttatccaatctcttttgaacataatctcttaaggcatcagtaacttcgatattttctccacgaacattgtattttaacattgtagattctccttccaacgtcttatgacgtttttctttacacatctagtatagcaaattgtaagcggttttactaatcatttatctactaattgtaaaactatttattttacaattaggataagcttctaataacgcatcccgagcatgatataatgtccgtcccgttgtataaatatcgtctaacaacaaaatctttcctcggacatttttgtttctaattgctgaaaatgtctgcttagttaacaaccgctcttgtctattcttttcaccttgagcctttttagtatccgccttaaccaataaatctgtcaaaggaactagattttgataaacagaagaaattgtttcaaatcctctttttcgtaaatggctgggagaactaggaatcgggacataataatcagcttttggcaaagaattaactaattcagccagtacatgactcaagacatagtcgccatagcgtttatactgtaccatcaaatcatgaaaagcttcattatattgatatatagctttattgtctaataaattgcctgagtatttttgttgccatataacacaatcagagcacaattcttttttatttatttctttattacagcctgaacatacgagacctctctttttagtaaacttttgtaagcaatcagaacaggcaaacttttctttaggtttagcaaatgaaaaaattctttcgtaattaatttgtctcctaaagttagaattacacagtagacatttgctcatctattcatcatcctaatctgtttcatcgcttcttggatacttttagtatatttgtgataacaaaataagactaatccatctcgatcatcagcacttctccccactcttcctgcaatctgaactaagctcggcgtattataaattggatcatcagcagcaattacgattacttgaacatgcttaaaagttactcctcgttctaaaatcgttgttgtcaacaaaatatctgtttctcgcctgcgaaaactagcaacttttgcttgtcgatccttatcgccggcatatacactaacaattttacttgttttaaaaattgagcttaaatacttttcgtaagttgacaattctttaattcgtgggacaaatattaaaagtggctttttcatatcaaggattttcttaatttgcttaatcaaagtcgggtgaacttttcccttatttgaaatataagacttaaaaaaatatttttctttaggtactggcaacaatccttgatgaaaccgccttttaagcaaagaataatttattgttttattcttcgcttgtcttaataacttggaatacggcgttgctgttagaaaaaaagtgcaacccactttctttactgcgttttctgccgcaaaatgcaacatcttattttcataaaagggaaaagaatctacctcatcaattacaattaagtcaaaagcttgataaaactttaaaagttggtgtgttgtacaaatcacgaattgctcatccctcacttcgtgatgttcacgtccatgatatttgccaattttcacgttttcaaaagctgcttgaaaacgtggaaacaattcgtcaactacgtcaattcttggtgtagcgatcgctattcggaaaccaccttttaaagcttcttctactaccttaaataacatttcagtcttaccagccccagttactgcgtgaattaaatgattacgcctttctttaaaagaatttactaattccctggagatcaattcttgctgttcagttaatgtttccctccagcttaatggcgtaagtattttaggataattaccattctcaacatttcgctctagttcatccccttctgttattctccctagtccaatacactctcggcaatatcgtcgcccatctggtaattttgatactgctttggtattacaccgctgacaaattccatttatcattgcaggaacttttgtcgtttcgccgtttatgttatggttattctgatcagatatccactggcgtccttttaatttggtcatcaatatcaccctatgttaattacgcacttggaggcgattttttgtcatcaaaacaattaaattatttaacaattagtaaagctggtcagcatgaactaattattaagaaaagtaaatttatttgttctttagcccgtactaaaacggttgaagaagctcaagaatttattgagcaaatttctaaaaaatatcatgatgctactcacaatacttatgcttatactcttggattaaacgataaccaagttaaagcaagtgacaatggtgaaccttcaggaacggctggaattccagaacttaaggctctacaactgatgaagttaaaaaatgtaacagcagttgtcacccgatattttggcggaattaagctaggagccggtggcttaattcgcgcttattctaattccgtaactgaggctgcacaaaatattggtgttgttaagtgcgttatgcagcagcgaattcaattttcaattccatataatcgaattgacgaaatcaatcattatttagaagaaaatcgaatttcaatcgctaaccaagaatatactacgaatgtcactattcaaatttatctagacttagatcaaattcaaaaagttgaagatgacttaattaatctattatctggaaaagtagaatttaataaactagatcaaagattcaacgaaattcctgttactgatttcaactttcatgagcaataaaaaagatttacgttaatatcaacgtaaatcttttttatctgtattctttctgtttaatcgtctaacctttacttcagggtccgcacgttccattttattaatagttcgttgcaagaaatgcagaagcggcttatatttttcacccaataatccaatagtctcaacaaaaagttcaactgcaaacaataagcctagaattaataaccaaattccccatctaggtgaaactaatgaaagaagtgacacaaaagaaaaaataagtgaaatcccataaatggctaagactgtttgacggtgtgtcaatcccattcgcattaactgatgatgcaaatggtgcttatcagcctgagaaatattcttcttattcaattttctgcggatcattgcatacactgtatcagtaattggaacacctaaaataagaattggcactaataacgatacaaaagttacattctttagtccttttaaagaaaagaccgaaatcataaaaccaatatacagcgcacctgtatctcctaaaaaaatcttagcagggtggaaattatatggtagaaatcctaataagcaagctgctaacataatacacataattggaacatagtgctgccaactttttagaaagaaaaagcctacaattcccatcgttacaagagaaatcaaagtaacgccagtagctaggccatcgagaccatcaattagattaacagcattagttaaagctaaaatccaaaaaatcgtcaggggaaaactccaccaacctagttgaagatgacccaataatggcaagcttaattctctaactttaattccagctaaaaagtacacaactagggacgctataaagattccaaacattttttgtctgggttttagttctaaaatatcgtcaattaatccagtcaaaatgatgacactagatgctagtaatacggaaaaaagctcgtgagtggggaaatctttcctcagcaaaacgaactctccaatattaaaagctacaaagatcgctaacccgccaatagttggcattggcttcttattaattcggcgagcatttggattatcaactgcacctaatacgaaagctaattttctaataaaaggagttatagcagcagtaataattactaataagaatatttttacaattgtttgaaacataacaatctactttcttaaacttctttttctcattatacctagaccccaatctaaacacaataaagcaataaacaaaaaagacgaatcttaagattcgtctttattttgctattgcaacagcacgtttttctcgaataactgtaactttaatgttaccaggatattccatatcttgttcaatttggtttttaatgtcatgagcaagaatagtagttcgagcatccgaaattttatcaggctcgaccatcactcttatttcacgacctgcttgaattgcatatgcttgctttacaccaatatgtcctttagctattgtttccagttgctctaaacgacgaatataattttctagggattcgcttctagcgcctggacgagctgaagaaattgtatcagcagccacaactagttctgcaataaatgataatttaggaacatcatcgtggtgagcagcaatcgcattcacaaccaaatctggttcatgatacttccgtgcaagttcaacaccaatttctacatgggatccttcaatttcatgatcaattgatttcccaatatcgtgtaataatcccgcgcgtaccgctattttttcgtctaaaccaagttcagcagccataacaccagttaatttacccacctcaatagaatgagataaaacattttgtccataagacgtacgatactttaagcgtcccaaaatttttactaattctggatgcatcttatgaattccaagctccattaaagcgctctctccagcttcgtaaatatcatcattcacttctttacgagctcgatcaaccatttcttcaatccgtgctgggtgaatccggccatccttaatcaaacgctctaatgctcttttcgcaatttcacgtctaattggatcaaaaccacttaagaccactacatccggtgtatcatcaataatcacatctacaccagttaaagcctcaaatgagcgaatattcctaccttcacgaccgatgatacgacctttcatatcatcgtttggtaaattaactactgaaacagtcttttcagaaactgtatcagctgcactactttgaattgcatcgacaattactttacgagcaaaatgatctgcttttgccttagcaagttgattactttcttcaatcatttctgctctctctttaaccaattggtcagaaagcttatctaaaacgatctttttagcatcttcttgacttaactctgcaacttcatagagcttctgctctcgctcggtcactaattgatcagctcttttttctttttctaaaacttgagcctgcaattttttaatttggttttccttttgtgtgagttgtgaatctttttgatccaacaaactatctttatgatcaatagcatcttcacgttgcagtaagcgattttcttgtcgagaaacttcttgtcgccgctcattcaattcattatctactctttcacgataatgatgaatttcttcttgggcttccaagattttctcttttttcgcatcagctgcggctttcttcattgcttcttgttgagaagcaagatcagcctctacagctttagccttactttctgcatctgccaagatgtgttttgcatcatgggctgcattctgagcttgagtctcccatttattcttacgaagactataacccgcacaacctccaactaagacagaaacaatagcgacagcaacaggaactaaaattgtatttatcatatcttttactatcgccttttttatagaattatttcacacattattaataataaaagtatccggaagtgatgtcaatcatacaaaaaaccttgacttttaaaagccaaggtttaattgtatttgtttactagttttttttgcttttctcattggaagcatcatcttttgcggctgctgcttccttctcctgctttattttttcggggttttcacgttcttcaatagctttagcatcaattccatatgctttacgtactttttctttcacttcatcgtacacatctgggtgctcttcaagatactgcttagcattctcacgcccttgaccaattcgatcatcaccatatgaataccaagaaccagctttcttaatgatatccttgtcagcagccatatcaatcaattcaccagtttgagaaattcctttaccgtacatgatatcaacttctgccactttaaatggtggagcaaccttgttcttaacaacctttagcttaacgcggttaccaattacatcagatccttgcttgatctgttccgcacgacgaacttctaatcgaatagtagaatagaactttaaagcacgaccaccaggggtagtttctggatttccaaacataacaccaactttttcacgaatttggttaatgaaaacagcaattgtcttcgttttagaaatatttccagaaagtttacgcaaggcctgactcattaatcttgcctgtaaaccaacatgagagtctcccatatctccatcaatttcagcccgtggtaccaaagcagcaactgaatccacaaccaaaatatcaattgcaccactggcaatcaaagtatctgcaatttgcaaaccttcttcaccagtatttggttgagataaaattaatgaatcaatatctacacctaacgcctcagcataagctggatccatagcattttcagcatcaatgtatgcagctgttcctccacgtttttggacttctgcaacagcgtgaagtgctacagtggttttaccagaactttctggtccatatacttcaataattcgtccacgtggataaccaccaactccaagagcagcatccaaagctagtgaaccggaaggaatagtggaaatttgagtgtctactttttcacccatacgcataactgcgccttttccaaagtctttttcaatcttctttaaggcaatatctaaggccttctttttatcatctttagccaaatctcttcctccttattcatttacaataattatacttggtttgactacctaaaagcaagagaaatacgaactaacgttcaattattatattcctctaatttttattacgcaaagtaactttatttttttcaaaaaaaagaagcatctctgcttcttttcgttttaaatttcgcctttaaatacatcgccactttgcttaaagtaatcataacctgaatagattgtaaagattaagcaaatatacaataaaatagtaccgatgaagtaaacatcaccaagcaataggaaaataatagacaacatttgcgtagttgttttaatcttacctggcattttagctgctaaaacttgacctttattctcagccaaaatcaagcgcaaaccagtaacagctaactcgcggcaaacaataatagccactacccatgcaggagctagatttaaagaaattaaaaatacaaaagcagtcattgttagcatcttatctgctaatgggtcagcaaattttccaaaattggtaaccaaatttctagaacgagcgatatgtccatctaaaaagtcagttattgatgccactgcaaaaatcactgcagctaatacatgagaccagtaaatatgtgcacctaaaatagttgcaccaccagcaggccagttaaagattaaaactagcataaaaactggaatcataaaaattctaaacatagttaatttatttggtaaattcattaacggttactttgacctccattattttgattggtattcgtttgcccttgagtgttttgagtgttttgagtaccttgtctattttgcgtattttgattttgttgtgtttgtgtattcacattattagtagaactttggctagtagaactactttgctgagtattagtactttgactattttgtccagtaaaagtaaatcttatagtcattggtgaagcaggattagtcgaattacgtgcattcaccttcttaccagctaaagttaaagtagtcgaaacgctattacccatttgtacagaaacattatttacattctgcggtaattgaattgaatgcttaccacttgcctttaatgttccttgccaaactgaagaaccattaactaaaatttgtgcccaaacttcattcttagtcgttcctaaagttaaagtacggtcattcttcattccgctaactcgataactattattacctaaactaacaattttaacttctgaagtcttagcttttggagttgatttcttctttgatgaagttttagattttgaagatttaatacgagaagaagaaacagttacattctcagcttgatttgctgattgttgattagttccagtaaagaaacgagtataaacaatataaactactaaaattactaaaacaacaccaactacggttgcaatctgaggcaagtaactacgccacatccctttacgactatttgtagtttctttaattttttcacttttattgtcgatggaattttcaacgtattcttcaggctttgcttcaggaacctctgatttatagtccgctaatagttctttaccattaagaccaactacatcggcaaattgtctaataaaggctctaacataaaaatctcctggcaattgatcaaaatcattattttcaattgctgtaagatatctacgctggatctttgttattttttcaacatcttcaattgacatgccctttgccttacgagcactgcgtaatttatctccaatatctgccataatatcctctcaactttttgcaataattcaaatatgagtataccaaactaatcaaccattaaacaagccagccaccatcaacataaatagtttgaccagtcaaataatctgaccgttcatcaagtaagctttctacccaaaagacgatatctctaggttcagctaatctcccggcaggaatttcattttttacttcgtttaaagtttctgcgtcaaaaattgcgttcattggtgtatcaactgccccaggagcaattacatttactgttaaatgagctgatgcaacttctcgtgcatatccttgcgcaaagctagataaaccacccttgctggcactatacacgctctctaacgcacttgcttggccaccatataccgaaccaataaagatgatacgtccatgttttctttttaaaagctgtgattctaaaagagaagtgatctttattggcgctaataaattaatttgcataattttttctatttgagttaattcttgactaccaaggaattggtaattagttattccttgagtaaaaatagcagcacttattggtaaaaggcttgcaatggtagttttaattactttatcttcagccaagaaatctaactttaaaggaaaaaattcttgatttggatatttatcaataaattctgctaccattttttcagcttcttgactgctatgattaaagtggatgtataaagaccaaccttttgcagcaaggtgggctgcaatggccttgccaattcctcctgttgcgccaaaaactattgcacgtttcatttaattagcttcctctttaccttttaaaattgtagtaaatatatcacttttagccaaaatattatcaattgctgtataaaattcactaaaacttaaggattgaattacgtaagcagcagtattgaagtcttcattttctaggccatattcagcttcttcaattgccactgtgcttaaatcatcaaattctctgattgtctgcgctaaagcctctttcttttgaaatacaaatgcctcttttgttattggaacttcgagaagctgactcttgatattttctaaaaataaatccggtttatttgaagcaccgataatcgtagcgaaatttccttcagtagtataagaaacttgaagctccattggagaatttaaaattccttgtttttgcattctttcaaaccagggactggttactcccaacttagcttgaagcatcatttcaaaaattgtttgtgctgtactattttttagatcgactttttcaaagtcaggcagtctgatccctataccaacacgtgaagtagccaaatcagattcaataatagtattatgctgcttttgtggactcacccaagttaatttcttgggtgcaacttttttagaaatcaaatatttgctctcaagttttcctacttcacgcagaacttcttttgtttgattttcactaaatccaccacatgcgacgaattccattcgaccactaatataattattgtcataaatttcttgtaaaatttctggcgtcatcttttttaaactagctttggtaccagttaaatcctccgccaaatttgtcttagggaacatcatctgcatcagttcataatttacttgccaattcggatcgtcctgatacatcgctaattcttgagcaataatcttggcttctttagtaacattgcttttagtaaaatgtgtcgtccctaccaattcaaaaatcagtggcaatacttgtcgccaatgttcagtaaagctggcataaaacatcgtttcgttatacgtagtaaacgcattagtagaagcaccaaccgcctcaaagcgctgcgatatgtctccattctttttggtaaataatttatgttccaaaaaatgagctccaccgcacaatttctgaggatcacttccaccaaaatccacaatgattcccataaatttttgtgcaaataatggccttctaattacttttgctcgaaatccagacttatattctctggtagttacatctaattttttcattttaaacaatagctttcattaaagtacaatttttgactaaactcgattaacttatccattttaaattgcttaacgtcattaattcgttgttcaaaagtataatcgcgacctcttaaagcatttgccagcatttgaattaaaattaaatcttgtcgatcagcacttatttgataattacgcttcaaagcagctttagctttattaaagacatcttcatctacttttcctgcttgaactgctcctacgccacttttaattgccttagaagcgactgcaattttatctttagaaattcctgtactaattaaaaaaagcgaattattaacataattagttgcatcaattgcatacgctgctcctagtttttttctaacctcagtaaacagtttagatgactcatccccagcaagatattctcctaaaaataaaccaccaaattgcttgaaatacaccggcaacgactgatcatagccgtaaccaatcaaaagttgtgcctgctcactcttaaattgcacttctttttctattggatcttctatagttgatagagacaaggttggcacaacgaaatcgtcaaaataaccaggccaatcaattcgattttgaactaaatcagttaaactgtcaggatcttgtgcttgccccaaacaaaaagcaggcgcattttttagtgtattaaagaatgacttaatttcttctaaactaacattttttaatgttttttcatcgccaaaaacactatcttgataattaggagtatttcgataccaagtattgaaaaagccatttaaagcaaagtttgcaggtagttcataatattgttttctttcctgttcaagctgtcttttggctaactctaataattgaccatcaaaaagtggttcctttaccaccttaaaaaaggcatccattactatctgataattataatctgggtcaagaatttcacgaggcttaacaaaatttatagtgtaaaaaactacaatttgatttccaaatacttcagaaaaaatttgtaaactcgcattatatagattagaaaaagtccttgcctgaatatttatccctggaaaacttttactagcattactctgcatacaggctaaaatattcgccaaagctaatgttttcttatctaaaggcaaacgcaaaaaacagcctaaagtggctgttttaaattttaaattatggtcaattctaatattcgtcataattactgatcatcgtccttttctggtggaataagtacttgtctcggtttagatccttccgaaggccctacaatcccttttgcttccattgcatccacaattcttgcagctcgattataaccaattctaaatcgacgctgaagcattgatacgctcgctgactgctgttttctaactaaggctactgcttgatcatagaattcatcctcaggctcatcttcaccatcagtttgactttcagaatcattctttgaaggaatcatgtcttcgttatataccgcttcttgttgctcttttacccacgatactattttttctacttcatttacggaaataaaggctccttgaacacgttcaggtttagctgctccaattggtaagaaaagcatatctccacgtcctaaaagcttttcagccccaacttgatctaaaatagttcgtgaatctaccccactagagacagcaaatgaaattcgagatggaacatttgccttaattaaaccagtaataacgtcaacgctcggtctttgcgttgccaaaatcatgtgaataccagccgcacgcgccatttgcgctaaacgaacaattgcgtcttctacatcatgaccagcaaccatcatcaaatcgcttaattcatctacaattactacaatgtaaggcaatttttccattaccgaattagtcttatcagcattgttttcagctaccttttgattatattcagtaatattacgaactcctccagctgcgaaaagttgataacgtctttccatttctttaacagttttacgtaaggcatttgtagccaacttagcatcagtaacaactggaattaataagtggggaatcccgttatatacagaaagttcaaccatcttaggatcaattaaaactagcttgacatcctctggataagacttcattaaaatactagtaataattgtattaattgctactgatttaccagatccagtagaaccagcaattaataagtgtggcatcttgcgtaaatctgccgaaattacttttccttcaacgtctttacctaaaggtacatcaagagaaatatcttttgcttttgaatcttgatgaagcattacgtctttgaaagaaacagctgaggtggttcgattaggtacttcaattccaattaaaggctttcctgggatcggggcttcaatacgaatatccttggcagctaaggctaaagctagatcatctgctaagtttacaatcttgcttaccttaactccaactgctggttgtacttcataacgagtaacagtaggtcctaagacagcttttttgacaatgacatgtacaccaaaactcttaaaagtagattctaagacttcagtatttttctgaattaaagacttatcttgactttgatcaacgctttttatcggtgctaacaaattaattggaggtttctgataattagcattttttgtttgagcgtgttgcttagtctctaaatcaccatgatcaacatcctgaagttcctgcttcatcttctgatcttcttccgcataagaatgtgaaattggcaaatcatcagccgaattatctccaacttctgcgtctgaagcagcggtactttcttgagaaacctcgattggaggatcaaaacgaggtgtttcttcaacatcttcagttttatttgaagtagatgcgtcttctgtgaaatcagctgtacttgggaaagtatcatcatgatcatccaaaggatcagtcaatttttctcgattatttaatttctcttgcttattttgctcatgcttttcgactaaatcattatatttactctttaaagcatcaccagcatctttatttttctcaattactaattgcgagcccttttgaaaaccagacaacaaagtagcaaacttcacattgcagatcatcaagactcctactaacatcattagtaaagatattacttctgaacctacggtacccaaaattggaaaaataagttgataaaacatacttccaataaagccaccaccaactttggtcgtaatctgagcacgagaaaattcttcaccaattgatgttaaaaaggcattgacaaatccttgatggatcatcatttgattgaagacacgagaactttcccaaaggagtaaacctaaataaaaaattcctaggccgcttcctctttttaaactaaaacgaggtggctggttataaatcaccataaccaagccaaataagcctaaaacaagactggctaaatagtgactatctccaacaaaaaagcgaattaaattaattagttgttggctaaacaaaccgaaatgaacgcaacttaaaactgctattaaaacaagtacgattccagtaatgacccattccatactttgttttttctttttagtagttgtctttctctttgtcctgcgttttcgctttttagccatcaagacaccttctcaatctttttacttatcatttttgcccttttggttatctcggtttaattcattaaagtttgatttaaaactaaggttaactgggtgatctaaagttaattgggtaatttcataagttaaagtttcaatttgttcaactaatggtctagaaagtaactggtaatctgatggttctaaatcggtcccatcgccaaaataatcaacaaattgaacaactctcgtaattacaccactaacggtaaaatcgccgggtgcgggagaaacctcgaatggaacagcaatttcaaaatacttaccagttttcccttcatcttggctaccgtcgtctaagtcttgataaacttgtcttaatgacacattaacttcattttttactttttgttcatcatttaaatcataatgaaaagaacgaacaataattggagtcatatttttaaaatccattttaattctctcctaaatttctttcataacgttcaggacgattataattatcctttaacttatcattttcataatgatggctcgtttccatatttggaaaaccttgctgtctcaaagcttctaaaagaaccatcgctactgaatttgataaattatagcaacgaatattatctgacataggaatcctaagattacgatcataatattctcgcataaaagtttctggtaaaccagttgtttcctttccgaaaacaaaataataatctttattaggatcagtatagtctacttgagcataattttttgaagaaaattttgaaattaaatacatttcatcatttggaccaagagtctttaaaaaggcatctaagtcatcatgcattcttatgtctactttatcccaataatctaatcctgcacgtttcatttttttattatcaatttgaaagccgagcggttcaataagatctaagattgtattagtacccgcacaagttcgagcaatatttcctgtatttgcaggcattaatggctcataaagtacaacgtgatttgtcataaaaaagctcctcttgtaaaaaaagcgtagcacctgtaatgaggcaagtaccacgtttaattctatactcaattctactctttagactttagattcgcatcatctgatcccgatatctcatcataaagagttgaaatcttacgataataattaaatagtctagtcacaataatcttaattacagcataaactggaatcgcaaaaattacgccccataagccggcaacagcacttgcaccaattaatagcaaaatagtagtaactggattcatgttcatcttattccccattaccaatggtgaaataacacgtccctcaagcgtttgttcaattgcaaagacaattaaaacctttacaagcatcataggtgagctaattagccccaaaataattgctggaataaaggcgataaaggttccgaaataaggaatcatgtttaatacaccagctagaacagctaatgttattccataatttagaccaattaccgaataaccaatcgcaaacattactccaacccaaaaagcaactgtaatttgtcctctaatgtatgatgctacagctccattaatatcactaagtaaacttgaaaaactaggctgtagtctttgtggagcaaatttggtcacatagggatttaaacgatgaccatcttttaacataaagaataaaacaaaaggcgctgttaataacgtcataaaaatcattgtaataacattaacagccgacgacaaattactcaaagctaagttaaaactgtcttgcccagttttaaacatctttgtctgagcgtcagaaacggcctgattgattccaccacgaactccatttaaacggggatctcggatcatcttttcaaagcccttttgcgcatcttgccaataagctggccagttcttaattaaagaatcagtttgatgctgaataattgggatcaaagtattaatgatccaaattaatcctcccaaaacaattacaaatagcaaaataattgtaattatgcgtggtacttttaatttcttttccatccagtcaactaccggatccattaagtaatattgaattgatgccaccaaaattggtggcaaaattgcattaaagaatgtccaaaaaggatttaacacaaaagaaatttggttaaacacccaaataattaagaagaacaataaaatattaagtaatactatgctaaagcgattatttaaaaaccatttaacaaagaaattattcttctgatgatgtttttctacatccatagcttcccctcttatctatgttcgtaggtgatccagtcccccactttaaatttaggcatttcttctttaggatctttttctaaataaattgcattagtcattggctttttcggaacttcattagtaaatactaaagttgcatgtccaatagcttgcatattcatttgaaccattgggccaacatataaagctaaataagtagttccgtcaatcgtaattgaatcgtcttttttaaaaataaatttttctactggagttgcttcatcaaatttttgtaaaacagcaacatctcgcaacttatcagttgctttgttatcaaataaaattacgatattatcatttggatctaacgcttctgatccaatagcagtaattgtagaattccacttcatttttatcaacctctttactaaattttaccatatcactttgcctagctgataacacttaataacaattgcctattcttgtcaaaaggtagagaataaatatgttacggaaagcttttatcaggaggtaaaactatgaaagtttggtttggtggctatactagccatgactcaaaaggaatttatactgctaatgtagaaaataatgaagatgatattaaactagttgatgttaaaaatattgttgaaattgatcgtccaacttattttcaactagttggtgatttactatttaccatcattcaaaatggtgaccaaagcggaatcgctacttatcgcatcaaggatggaaaagcaaaacagttagatacctatttccatgaaggagcagcgccttgttatattagtgtcgactcacaaaagcacctagtctttactgccaactatcacttagcaactattaacgttttttcttatgatgaaaatggaaaattaacttttattactaacgatactcatgaaggtcacggaccaagagcagaacaagatcaagcccacccacatttcttcgatgaaactccagccggtaatctagtttcatgtgatctaggaattgacgctgttgatttttataaattagatggagataaattaaaacacttagctcgttatcaaatggaaagcggctttggtactcgccaccttgtcttctcacctgatggaaaaactatgtatatcgttggtgaattatcaagtcaagttaacgttgctcgcttaaatgaaaatacttgggaatttgaagatattgcaacctataagactattcctgacgacttcagtgatcacaacggtgccgcagctattagaatttccaaagatggtaaatttatttatatttctaatcgcggtcacgattcaatcgctgttttcaaagtcctaaacgatggaaaactagaattagtacaaagaatttccgtctttggatcattcccacgtgactttaactgggataaggacgaaaaatatcttgttgtagctaaccaaaatactaataatgctactttataccgtcgtaattccgaaacaggtaacttaactcctatccaaaaagatattcctgtaccagaagctacacgtgtcttattcgaagaagattagtctgataatagttatcacagattattaaactcccattttgccatgattttcatggcttttattttatcttacttagaaagcaaatatttacatgcaaaataatgctactgataaactatcaccattaaaaaagttaaccgctgagcaagaagcattggttaatcaaattattaactttaccaatcagcaccttaacaacaattttcctgccacttttactatttatggtgacgctggaactggaaaaagcgtagtcctttctgcactttttgatcaaatacaaaaattacgtcaaactaaaaatagcaatttttatcaaactaataattatttcttagttaaccatccagaaatccttaaagtctataagcaaattgccggtccgcttccagaattattaaagaagaattttcaaagaccaactagctttattaatcagttagacaaaaagcaaaaagaagctgatattgtcattattgatgaagcacacttacttctctcaaaacctgaccactacaataatttctatcatgataatcaattagttgagattattaaacgaagtaaggtagttattctagttttcgatccctatcaagtattaaaaatgaaaactctttggactaaagagcgactagaaagaattacgcatctttatccacataaagaatattacttaaagcatcaatttcgaatgaatgcatcttcagatctgattgattggttcaattcttttactgaaaataaaattatcaagccaatcccagataatgcaacaaagaattatgactttcggattttcaatgatgcggaagaaatgcggaaagaaattgttaaacgtaacaatgaagtaggcttaagtagaattctttctacgtctggttatccttcaacattagatggtggcaagcactatattcaagaaggtaaatttaaaatgccatgggatcagtataattacacctcaacaccttgggcagaaatacctgaaacgattaatgaagtagggtcaatatatacttgccaaggttttgatctaaactatacaggcatcattattggaccgccaattagtcagattcctggtcaaaataaaattcaagtcaatttagacaaaatcaccgatattgaaatgtttaaaaaaagaaaagatttaactgatccaattgaaattaaaaaactagaagaaagaatggtacttaattctttaaatgtactctttaaaagaggaattatgggaacttatctttatgcacatgatcctttacttagaaaaacgctagtttcgctgtttaaaaaatagcaaaataataataaaaataggcgctggttttttacccatcgcctatttttttaattctcatttaaataaattgttacaatcttaaatcaggtttgcttcttcaagcaattcttcaatccatgttcccttaatcttcttcatccctgctttaacggcaagcttttcaggaagtggcatttcttgatctgccagcttcttcttatcagccatgtagtacattgcacgaagtaattcacgaatgtcataaacagaatcccaaacttctggtactccgcgatctacattaagcaaggtgtaaactgactccatcgcagttctaactgaatattcagtagtaaagacagtatctctagtaggactttcagcaaagttaccaataaaggctaaattctttgaaccttctggtacaacagctggacggtcgccatcatgacgcggcatgaagtaactagttatataaggcatatatactggaacagtattcatattttcttctgaagaaagttctttaatttcactttctggaacacctaaatgatacagcatttcttcagcgatttcttgtccggtacagtcaacaaccttctttttaatgtaatttccttcagtatctgaatataaagcatagatccaaacgacgatttcatttggtttttgcgttgggaagtgtggttgacggtgaatggtaaaacttaagccccagttagaatcagttactgtgataataccaccagtatttactttgccatcatataaactgcgtttagtcaatctttcaaagtaaggtgctactttcttatttttcaaggttgtagttgcagaaacaaaccatgatctctctggcaagttttcactaaagacatcaggatgaccaaatgctgggtcttgcttagctagattctcccataatctccatgaaccacctttagcatgagtaattggtgctggtgtagtttggttaccataagttgagctttcagtaattgaaccgttagtcacaaagacaagatcattttcagttaagtcaatatcttcttgcttaccatctttcttcatgacaatctttttagcaactttttcgtttccttcatgatcaactagaacattttctacttgaacaccatactcaaacttaacgccatgatcctttaagtacttaagtagtggttttaccattgaatcatattggtcatatttgttgaactttaaagctgtaaagtctggtaaaccatcaatatggtgaataaaccgcatgcagtagcgtctcatttctgcaagagaatgccatttttcaaaagcgaacatcgttgaccaataagtccagaaattagacttaaagaattctggagagaaccattcttcaatagtctttccttgaatttcagattccggtgtcaaaactaatttaactatttcactagcatgtgaacctagttgatataaaccatcagttggcaattcattaccacgtttatgaattaaccggcaatttgatgagttaggatcttctttgtcgagccaataatactcatctaagtaggatgcccctggtattctcaacgaaggaacagaacggtacatatcccacatacattcaaagtggtcttccatttcacgaccaccacgaactacaaaaccagcatttggacgcttagttccgtctaaagagcctccagcaacatctaattcttctaaaatatgaatcttgtcaccagccattttagcatctctaactaagaagaatgctgttgaaagaccagctaatccactaccaataatataagcagattttttgtctacatctgctggcttttttgtgtctgcaaaagcttcataatttccctttgaataatacatacaagtgatcctcttttctatattaggatagtattagcacttcttatattcaattctatgtaaagcggttacaatagtcaatgtatttgactattatatttataatttattacttattaggctttgccacaaacatttcatatcaactggttctgaaatagtaatttcctgcttaagttcagaaaaaggatcatcaaacttaagataaaaacaattcaaagcttgtcgcttaaaattatctttaatcccatacaatggatcaccatacaagggatgtccaaggtattgcatgtgaactctaatttgatgggttcggccagttagtaactgtaattcaactaagctcgcaccattaacttgctctaaaacacggtattttgtaattgagcgttgaccattagctactattccgcgtttaacgccagcatctagtttaccgattggcgcatcaatagtccctgtttcttgctctttactaaaattgccatgcacaattgcatggtacttcttaataaaacaatcctttcccatctcactaaatcgagcatgagcaactgcattttttccaactaaaactaatcctgatgtatcacgatcaagtcttgtaataacatgtggcttcagatctttctgcccatttttttgaaaataatatattaatctgttgactactgcatcattatcttcatagcgagatgggattgacaaaacgccagcttctttatttacgactaaataatcatgctgttcaaaaacaatattaagttgattagtagatggttttagccattgatttttcttctcttcacctaagataaagattacttcatcccctggatgtaaaagatagctagtataacggcgatgatgatttactaaaatcattcccccattatgctggctattagttaaagctcttttagaaaaaccatttcttaacaaaaaacgccccaatttttgaggtgttttattttcaaattttaatttaaaatattgcatgattatttattcttaggttgcccaataaaggcatcttctacccgattccaaaagtgagtatgttgatatttatcaaatcgaataacatgttgagaaatccgatactcaattttcttaatgtgcttatgattgaattcatatccatcataggttactacgtagtgatcatcactttctggtttaatagttatccattcatctggagcaataactattggggacgataaggttctgaatatacggttattaatcgaggctatttcagtcatttgcagggcttttaaacggggatggataactgcgccgcctaatgatttactgtaagcagtagaccctgtaggcgttgaaacacataaaccgtctcctttaaagctttcaaagaattggtctctaatataaacatcagcctttaaagtcttagaaactcgtttaattgttgcttcatttaaagcaagtaactttttcttttcacctgagccagtagtaataattaattctagcagcggataagaagcggaagatggttgttttttagttaaattatcaaccatctttccaatttcgaaattacgccaatcagtataaaaacccaagtgtcccgtgtgtacaccaataaaccttatctgatcaactaaattttgatatttgtgaaagccagaaattaaagttccgtctcctccaattgtgattaccacatcaggattttcaggatcaatttcgatctttctagaatcaagcaatttttctaatgccttaactactgccaaggtttcaactttttcattataaacgagtgcgactttcattattgttcttttcctttagatttagtaaaaattctctgtgcttcctgcacttcatctttgattgatgacatttcttcatctaacttataagcagcttcggctgttgatttaagtcgcttagaaatatcttctgggtacttcccttgatatttataatttaatgtatgttctaccgttgcccaaaaattcattgctaaggtccgaatttgaatttcggcaattatttttttaggtccatctggtaaaaaaacagaatattcaattaccatatgataagaacggtatccagatggcttagcattttgaatatagtccctttcttcaattacctgcatatcttgacgctggtgaattagatcaactactcgataaatatcatcaacaaattgacacataattcggatgccagctatatcttgcatatcattttcaatgacatcaggagcaataactcgccgcgtcattttttctttaattgaatcgactgtttttacgcgtccgaccacgaattcaatcggcgaatgctcacccttgtttaaaaaactttgtctaagtgatcgaaatttaacttttaattcagatacagcctgttgataaggccataaaaataaatcccaatctttcatgtataaatcctttccgtttcaaacaaaattattctaccatagagagggataacattaactagtgaaaggataaaattatgagtaaaaatttagaaattgaatcaaaaacactcctagataaagatacctacgaaaaaatgcgtgacgcatttactgctaaatcagattttattcaaaaaaactactactttgatacacctgattttgacttaaaaaacagtgatgctagtttaagaatcagaattttggttgatcatgctgaacaaactattaaagttaaggaaaccaatcctaaagaaaataaatatagtgaaagagtagaaattaatgatcttctatcagtagctcaagccgagcaaatggctcaaagtgcctacgagggtactttcttcttatttggtggtgatgttggtaattatttacaaaaacattattctaataaagccattcactccttaaaactaatttcttggagccaaacacgtagaatattagctgcgggaccagagaattgtgaattaactcttgatttaacagaatttccagatggttattatgactttgaattagaaattgaaaacgatgatccagcaactataaaaaaggtacttgctgaattagaaaaacagtttaatttcaaagctgacaaggaaaatactaaccaaagcaaagtaaaacgtgcctgggaacataaaaaataaaacaaatttttttccatttcgttcattttctgatacagtattcatgaacttggacggaggaaataacaaaatgtttgaaatatttttctttgttaatccgattgggattaactgttatcaaaatgaacaggaaataattgctgcagtcagtggttatcaacaaaatatttcttaccactttattcccatgactactatgaacacaattcgtagcgatatcagagcaagacatctttcatcaagtaatatcgaaattttcaacacttttagtcaaagcgcttataacgcaaccaaagattatcacactctaaaattaatagctggcaacaaaaaagctagacaatatatcatcaaattgcaacatgctattaatgatatgggcaaagtttattctacagagcttgttaatgaaattttgagttctctagatgtttcaattaagaacttcaagaagaaccgagaatcaaattatattaagctttcaatggataaagatttaaaacttgccgatgacctgaatgttgtaactactccaactacgattatttttaattatgataatgatcgtggtgattcagggatgatgattgaaggttgtgcgaatcgcgaagaaattgagtccgcaatcaccggggatagacaaactagtagtgacaatagtttgcgcttattataatttagtgggctagttgacttttgagtcagctagttttttttgcagaaaaattaatattggactcttttctttaggctcccgtaattttaagaagagttcatctgggatatctgccacagaataatgtagttgatataatagcgaagcaatttctaatccgagtttactcttttgagtaatttgtttttgtaaatatactttttgatcttgaatataactcagtttatttcttctagtagatggaatgaaagtaaacaaactagctactcctttttcatctaatgaaaaagtttttatatcatagcttagttctgaactaagtgctgccattaaaatattatattttaacgtaattacacaactaaatggattaatttccaaatagtaccattgccattttgcactatatcttagaaagattttttgagaatggttaattttattttttaaataatgcctttttccaacaatccaaatatctttaatctgcaactttttatataaggcatgacgatgggcaaattctgcctcacttaacggtgcgcattgtacttcaaaagataagttgttttctactaatatgtctgctcttaattgctgatctaaaagcggaacttcaacatctgctcgaattccatttgcttttagtgcagtacacaacaactgctttgcctgtaaatgctcctccttttctccggttccccttacctgataaaaatgtttaaaaaatggctttttttcttctgataagatcaaaatcattcgatgcttgcaagatgggcaaagataagattcttgatttaacttttttaatcctttactaacttgttctgcttcattaattgctaagactaacttttgatttaaaatagcagcatacattttatcgcccattattatatacgcaaaaaggagatgatttttttcatctcctttatttttaatcaaaatattgtcttaggtttcccagagcatcttgtctaatcaagcacttagcatttttctttattttttggaattgcttttctgtcattccatttccatattcattagctattacccaagtatcttctggcttcagttcaacataattgtcatctaagtaggctaagtctaaataatattcatgatgatatgtatatagactagatgctaaaccatcaacctttaatgcatctgctagggcagcaactaaatcaatactatcaatcttaaagactctacgattatcgctaattagtttatcttgatcattaatttctgttttacgatcatcattatctgatccagcccccaatccctttaacaggtcacgtaattgatcattgggattatcactgacatcttcatcactgtccggtactttggaaataagtaactctaatccagaactacttggcataacttgaaaagtaactggatcgcctttagcaaaagtatgatctgtatcgacttcacttaaaatttgatagaaaaaatgttgaatttgacttttatttcctaataaatcgagcattgttataccacgctctttaagttcatccgcatccattgttacacgaatggtattctcacttattctatgtacttccacttgttatcacctcgaagtctcttgtctttaatacattgtaacctattttcttgttcatacaaaaacgctagcttaaaaaggctaacgtttttacaatttttaattaaagatcagctgtcattgcttggatttcttcaagttccaaacgacgaacctttcgaggaagaaatcttctaatttcatcttcgttatatcctacttgtaaacgtctgtcatccataatgattggacgtcttaataaacttggatttttttcaacaagatcaatcaattgatcaattgataagtcatctaaattgatttttaagttttggaaagtacgagaacgagtagaaattatttcttccgttccattctcggtcatacgcaaaacttgcatgatttcttctttattcaatggattagcaaaaatatttctctccttaaaagaaatatcatgctcttttaaccatgcttttgccttacgacatgaagtacaacttggtgatgtatataaatttaacacttaactccacactcctttgcgtgtagaaaaataactaccgtttcacttacagctatcattgtatcacaaatacttgttttttgtaagttgtaattagatttctttttattagcttacaagtattactttatcagtaaataatgaagtttgtgtgaagttttgacagaaaaaaagagtactttcgtactctctttctattagtcattaatgttaagcttcttcatagtttcttcaactagcttcttattttcatcagcagtttctgaaacaaaacaagctttattagctaattctttaatatcttcagtattgatcttcttcatcaaacttctgatacgtaagattgaagttgcactcattgaatattcatcaagtcccattgataaaagaattgggaacataatgtcatcaccagcagcttcaccacacataccacaccaaataccattttcatgagcaccatcaatagtatgcttaatcaaacgtaaaacagatgggttatatggttggtaaagataagaaacgttatcattaccacgatcggcagccatagtatattggattaaatcgttagttccaattgagaagaaatcaacttctttagcaaattggtcagctaacactgcagcagctggaacttcgatcatcataccaacttgtaagtcgtcaccgaccttaacgccttctttaacaagcttatctttttcttcagctaagatttgctttgcttcacgtaattctgccaaagtaccaatcattgggaacataattcctaatggaccatatgcagatgcacgaagtaaagctcttaattgagttctaaagatatccttgtattgcattgaaagacgaatagcacgaacacctaggaatgggttcatttcttctggaagatcccagtaatctaagtgcttgtcaccaccgatatcacaagttctaatgatagtttgcttaccatccatatcttcgataacttctttataagcatcgaattgagcttcttcagatgggaagtcttttgaattcatgtataagaattcagttctgtacaaaccaattgcttcagcaccgttttcttttacacccttcatgtcattaggagtaccaatgttagcagcaatgatgaacttcttaccgtctgcagttacagaaggttcattctttaacttcttccattcttctttttgcttagcaaaggcttcaccctttttggtgtattcttcaacttgagcatcagttgggttaacaatagcatcaccgtctaaaccgtcagcaataagcatatcgccatctttaacgtctttagtaatgctttcagtacccacaacagctggaatttctaatgaacgagccatgattgctgagtgagcagttctaccaccaatatcagttacaaatcccttaacatactttttgttaagttgagctgtatcacttggtgtcaaatcataagccaccacaacaacttcatggtcaatagctgcaggatctggtaatttcttaccaagaaggtgtgccataatacgctttgaaacatcacgtacgtcagctgcacgttcttgcatatatgcattatcagtcatgccttcaaagatggtaataaacttttgagcagtttcatctaatgcagcttcagcattaactttttgatctttgatttctgtttcaatggcaccagtaaattctgggtcacttaagaagagaaggtgagcatcaaaaacttgagcttcttctgctcctaaactttccttagccttatcacgaactttttctagttctttagttgattcttcaacaacttttttaaaacgagctacttcagcatcaacatcgctaactgatgttttagaaaacgaaaggtcaggttctaccaaaaggtaggctggtgcaactgcaataccatcactggcagcaattccctttaaagttttcgacattattcagctaaaccttcctttttcatagtgtcagcaatagcttcgattgcttctttagcatcgtcaccatcagcagtaatagttacgtctgcaccttggccaacacctaaagacataacacccatgattgacttcaagtttactgatttaccattgtattccaagttaatatctgagttaaacttagatgtagcttgtaccaacaaagtagctggacgtgcatgaataccagtttcagcaacaatatgaaattcgcgtttttccattttaaattatctcctttaaaatcaaaaataatcgggagttttatacccactcgtttattaggttatcatgtttttaacatgaaaacaatacaaatgtaaatgtttacattataagttgcttaattttcattatcagataaggtataaattatatccccaccacgctgagcaattccagttatactttgccttttaccatagcttctaagtgctaattgaaattgaaaagcatctttaggacttactctatattcttttaattcgccactcacgatctgatctagtatttttttataatccatatcttatgaatctcactccttaaattttactagcttagtaagaaattaattcttttcctattgtagcaattatttagcaaaaatctaatctaactacttgcaattagtaagtatccgtactatgatattagcaagttagcacttaaacatcaagagtgctaaaataaaaatatagcctgtatattataagaaaggcggaaatattaatgctatgcgataactgtcatgaacgtcctgcctcaattcatctttatacaaatgttaatgggcaagatcgtgaaatatcattatgccaacaatgttatcaagaattaaaaaatcaacaaggacaaattaataatatgaataataacaatgctttttttggtgattttgatgatttattaaacgccttaaataatagtaataatgagcaaaataattctcaagaccgtgatccccgaatgagaatgggcggtggacgtcgcggtggcaataatggtggtcaaaaatcactattagaccaatacggaactgatttaactaatctagcaaaaaaaggaaagattgatccagttattggacgtgataaggaaattgctagagtcattgagatcttaaacagacgcaccaaaaacaatccagttcttattggagaagccggtgttggtaaaacggctgttgttgaaggtttagcacaacaaattgttgacggatctgttcctgctaagctacaaaataaacgtattatttcactaaatatggtttcgatggttcaaggcactggtattcgtggtcaatttgaacaaagaatgcaacagctaatcaaagaacttgaacaaaatgacaacatcattctatttatcgatgaaattcatgaattagttggtacaggtaatgctgaaggtggtatggatgctggcaacattattaaaccagcattagctcgtggagacttccaactaatcggtgcaactaccattaaagaatatcgaaatattgaaaaagattctgctttagcacgtagatttcaaccagttgaggttaaagaaccaactactgaagaaacagttaaaattctccaaggtattcgtaaacgctacgaagattatcaccatgttcactatactgatgaagcaattcaagctgccgtcgccctttcctctcgttatattcaagatcgcttcttacctgataaagccatcgatcttttagatgaagctggttcaagaatgaaccttactattccatatgtcgatagtgaaaaaattaaggaaagactagatgcagctgaaaatttaaaacaagaagctttgaagaatgaagactatgaaaaagcagcttactatcgtgatcaaattgaaaaatatgaaaaattaaaagatcaaaaagtagatccagatcaaacacctaaaattactgaaaagatcatgaataagattgttgaagaaaaaactaatattcctgttggcgacttacaaaaacaagaagaaactcaattaaagaacttatccactgatcttaaaaataatgtaattggtcaaaataaggctgttgaaactgttgctcgcgcaattcgccgtaaccgagttggtttcaacaaatctggtcgtccaattggttcattcctatttgtaggaccaactggtgttggtaaaacagaattagctaagcaactagctaagcaaatctttggtactgaagatgcgatgattcgttttgacatgagtgaatatatggaacaatattcagtctctaagttaattggttctgctccaggttatgtaggatatgaagaagcaggtcaattgacagaaagagtacgtcataatccttatagcttaatcttatttgatgaaatcgaaaaagctcatccagatgtacttcacctcttcttacaaattcttgatgatggtcgtttaactgattcacaaggtcgtacagtttcatttaaagacacaattattattatgacttctaatgctggtcaaggaattaaagaggcgaacgttggctttgctgctgaaaacagtcatcaagaacaatttaagaatgctcttggtcaatatttcaagcctgaattcttaaatagattagatgatattgtcgaatttaattcacttgataagaaagacttaattaagattgtcgacttaatgcttgctaatactaacaatatggtcaaagatcaaggtcttcatattgaagtcactccagaagcaaaggaactacttgtagaaaaaggttatgatccatctatgggcgctcgtccacttcgtcgtacaattcaagaagaaatcgaggacaaagttgcagattacaagttagacaatccagctgctaaagacttaaaagctgatgtagtagataacgcgattgtaatcagcgaaaattaagtattcaaatactaaagagagccacataaatgtgactctttttttatttatttttataaatcttctaaaaaaggttatacttaagttgggattttaaagacacatttatatatcgaggttataaatatgatgcatttaattgatgttacaaatagctaccgtgatttagttcaaagacagctagcagctacaaatagtcaattcgtaaaagtttactctttaggtaatactacagtagtatacagcgaaaccgctgataaaattgaaatcgtaatggaaaatcataaacgtcctatcagacaagacgaagtagagtttgttattaagcgtttaattcatgaagatcgaatttacgatataacagttgataagagtagaaagattatttctattacttgtgatcgataaaattgcatttaaaaagccgtggaaaattccatggctttttatttttgactcaattacaatcttgaagttaattcaacatctggatatttgtctttgaaccatctttctgcaaaagcattttcaaataaaaatagtggctcaccatctctatcttttactaacaaattacgagaagatgacatctttggatctaactgatctggattaatccagcgcgctacacggttacctaaagtatgaagctctacttctgaattatattcgttcttcattctaaaagaaaagacttcaaactgtaattgaccaactgcacccaggatataatcatcagttgaataaccacgataaagctgaattgcaccttcttgaactaattggttcatccctttatggaacgacttttgcttcataacatttttagcagttacacgcatgaaaatttctggtgtaaattgcggtaaagctggataaacaattttcttcttaccggcgtaaattgagtctccaatttggaagtttcctgtatcatatagaccaactatatcgccagcaaccgcatcagaaacttgaactcgttcactagacataaattcagttgcattatttaatctgactggctttccagttctagctagagttacgtcaatcccctttttaaattcaccgctaccgattcttacaaatgcaattcgatcacgatggttaggattcatattagcctgaatcttaaatacaaaaccagagaattcaggatcgtctgcagctaatttttcatcaccattaacaatatgttcttgaggagctggcgctaaattaacaaaactatctaagaaagtctcaacaccaaaattagttaaagctgaaccaaagaagacgggagtttgatctccttttaagattttttctttatcaaaagtatttccggcttctttcaacaagtcaatatcatctagagttgattgatacaagctatcttgcgctaaaggttcatcttctgccaattttccatttttatccagcggtaaatagcggtcatcatcatcttttcgataaagttcaacacgattatttgcaatatcgtataatccctttaattgcttccccataccgattggccagttcatggctacgccttcaataccaagtaaatcttctaattcagcaattaaatctagcggttcacgtccgtcacgatcaagcttgttcataaaggtaaagataggaatgccacgcttctttacaaccttaaataattttttggtttgaggttcgatacctttagcagagtcaataaccattaccgcagcatcaactgccattaaagtccggtaagtatcttcggagaaatcttggtgtcctggcgtatcaagaatgttgattctcttaccctgatattcaaattgcattactgaactagtaactgaaataccacgctttttttcaattgccatccagtcactagttgcataatgtccacttttacgtgctttaactgtacctgcacttctaatcactccaccaaaaagaagcatttgctcagtaattgttgtcttacccgcatcagggtgagaaataattgcaaacgtgcgtctttttttcacttcatcagttaactttgtcattaatctttagcttcttccttttcttgtttttctggaattgtaagtaacagcgttaataaacgcgaccccttcattcgtctagtcgttaaaatcattccattatcaagtttgacgcttagtttttctcctttagccggaatcattcctaatttagtgattacgtaaccagcaaccgtatccacatcttccattgctaaatcagttccaaattcttcattaaaatcagctaaaggcatcttcccataaattacatattctcttggcccaatttttgaaaataggacctcagccttatcaacctcatcatcaatgtcgccaacaatctcttcaattaaatcttcaattgttgtcagtcctacaacaccaccatattcatcagttaaaattgcaagctgtctttgagtttgctgcatttcaactaataattcacctaattcaattgtttcaggtgcaaataaaggcttaaacattacctgatcgtaatctaacttatcaaagccaatcttatgggctttccgtaaaaccgtcctaatatgaataacaccaacaatcttatccttatcaccatcatagacaggtactcttgaataaggttctttcaagatttgatctaagttttcttgaaaattatcattgatatcgaccataaaggcatctgttctaggaaccattacttctcgagccattttttcttcaaactcaagaataccctccatcattgaaaactcacgatcactaatctctttttgctcatgtaatttatttaaaattttatttagcttacgttggccatcaatatcttcatcgccgcgaaatttagctcttaatttgctaaatatatcacccgcaccgggatcactactcatcttaatttctctctttctattactgccttaatcccactttaatcataattatcggtaattatatcatatggtaatctatgataaaataaggaacaagaaatggggtcttatagatgaaaaaacaaaatatctacttggtatttacattcttattattaattccgtatctttgcagtttaactttaatcggcatctgctacaatgctttagttagacactctagcgatctttttcgaagctttattggcgccttggttggaacaattatcatgtttgctattaaggcaaccattcagagaccacttgatttagtctctgctaaagtaccagataacttctttaaacaaattctacgtttttacagtattcgcagacgtaaacttttcttagttggtaactgcttagttgatttcgtgctttgctggcttgcgatggatctcgtgagaagatgcttctcattatccttcattattggaaactcggttggcattgtcttattaatcatgctgatttcaacatgtattggtgcttatatcgaatatgacaacctatctattgaccccaaacagaagtaattattatttagcattatcttcagaactggcatccagatataaaatctgtgccagttcttttgtttctaagttcaacttcgctaaaacatacggtttttcactgtctcccagattttcatacattgtaataccatcttttgataatttatctaaaaaagttggaattacaaaatttaaaggttgactaaagaaagctaaattactattaggagtatcaatttccgcaatttctgaagtaggcagttcaaatttatttaatccagcaacaggcatttgtttatcatcagctaaaacaccataccaaaacataaagttctccggtccaaataccaccaaactggcacgctcattctcatagccattatcttcaataaacttttgaaaaattggatcattttccatttcttgaatagctgctgtataagttttattttcatcaatttggtttggcataaaaaccttaccaataaaattatgtgccgagtatttttctttcttcattttctctccccttaaaaaaactacgatctaaatcagggcgtaattggttatatctttcataccaaatttgcgcgaattttttggcaaatggacccttcttttgatcaatccaatctaacaattcaaaactagcactacgcaaaatactatcaatctcttcgctgtaatgccagcgttttttgttcattgcatactcgtccgcatctagtaatctagtctccccatcaggaaacaccttaatatctaaatcatagtcaatatatttcagcgcttctcgatctaatataaaaggactggctaaattagcataatatgcgactccatcaggtctgagcattgcaatcacattaaaccaaagtttacgatgaaaataaacaattgctggttcacggctaatccattttctaccgtcttcttctgtaatcaaagttcgatcattaacgccgataataatattctgctctgttttaaccaccatagtgtcacgccaatttcgatgtaacgtgccattatgcttataactttgtattgcgatataatcgccttcacgaggcatttccataatgtgcgcctcctcactaaacattataccagcaaattaatattcatctatttcttctaaatctactatttcaccatttaagaaactatcaatttcaccacttgaaaagccgtgttgaaacaagtatcttttaactttctgctttcttttaaaatcttcgtctttgcggtagcgacgccaagccttgcttccttgcttttttaaagcttctatttgttcatcttcatccttctctaaatctaatttttcaagaactagttcacttagctcttgatcaaatccatgagctctcagtttagtccacgccttttgcttaatctccttatatgaaagtttacccgcttgatgaataagcgaatgtactacgcgaagccctgcatcgacccattcttcatcttcaatctcataaagtgcttcttgaataatatcagctgcaagacctttttgctttaattttctatcaacagttcttggtccatcttttccaactcgaagattatttttaataaacaaacgagcgaaattattatcatttaaataattcaactcaatcaaattctgaacggcagcttgactagcatcctgactaatttcgtgtttatttaaatactctaaaacttcatacacactacgtggttgatagcttaaataagacatcgctagctgaatagcatgactatctgcttcagcctttttaatttcttcaatgtcttcattgcttaactcggttccctttagaagtctcctctcagctagagttctttcacttacgctaaaagcatactcattgtctataaaaatgttatagcgtcccttacgcttctgcgtacttatcttagttataattggcattatcgcaccttcttcattttttggtttcttttctatattataataaattaaatacttgtatcacttgaacataacgcttatgcttattgtgacacttttttcatgaatcaatcgaaatgagggccttattttgacaaaatttactaaaaataaatcagaaaaagatattatcatcactattaaacggctaggtattaatggtgaagggatcgggtactataaaaagaaaattatttttattcctggtgctcttccaggtgaggttgttgttgcaaagatcattgataggcacccacattatttagagggtgagttagttcgaattaaggaaaagtccccagatagagtggcttttccgaagggagtcgatcctgcagttggcggcttagagcttgcccatctttcttatccaaaacaacttgagtttaagcaacatctaattctagaatctctcagaaaatatcatccaagagactacattaaatacaaagttaaaaaaactattccggcaccaaatgactggcactatcgcaataaagctcaataccaaattgaatttaataaaggaaagagtaaactcggcctgtatgctcctaactcacgtcgtttaattgatcttcctgagatgccaacccaaacaaaagaaacgcaaaaaacagagcgtgaaattaaaaagctaattgataaacttcatattcggattgctgactttagacgtcataatgatggtattaaaaccattgtagttcgtcaaagccaagctactggggaaatccaagtaactttaattacaattggcaaaaaaattagagaccttaagttattagctagccaaattatgaaacttcccaatgtggtttctgtctttcaaaacgaaactcaatggcaaaaccctcaagtttggggcaacaaaacaattaaattacttggaaaatcacatattatcgaagaaatgttaggtaagaaatttaaactctcaccccgtgcatttttccagttaaatccagaacaaactagcacactctattcagaagcacttaaatacttagatttaactccagatcaaactttaattgatgcttatgctggtgttggtactctaggaatcctagctagtgatcaagttcgacaagtcattggaattgaatctattcctgaagctgtaattgatgcccaagagaactgtcacttgaatcatgtgagaaatgcagaatatattcaaggaaatgttgaaaaattacttcctgaattgaaaaatcaaggtgtcccaattgatgctttaatcgtcgatcctccacgaacaggattaagcaaaaagttaattaagactctccttgaagtaaaacctgaaaccttcgtttacgtttcttgtaacccagctacacttgcaaaagatttagttcttttaagtgaagcttatgacgttcgcgttattcaaccagttgatatgatgcctcaaactccgcgctgggaaggcgttacaaaattagttttaaggaaaaataaatatgtaaaataatattaatctaatttttagcagtccgactgactgctttttttgcttataaaaaaggttgtagactgcctggtctacaaccttttttcaagtggatgaggtaaatactatctagcgccataacatcagtatctgggttcaatattatgacttgatcaacatcacttgtttgcatctgtattgaataacgactatttgatcttactaagagaatcttgtctttaaaacactacaatctggagataaaaactttttacaatattattctacctctccacatatcttattatagcaactatgtaagcgaatacaagctatttaactctatattgacgaatatcgtcacaaattccagcaaaatagtatctgccttttttttcatcgctagtaagttcaacattattttgaggatctactaaacttgctgaaaagattttctcatattcaggaacacttaactttcttcttttatctaatagtgcctcgtcagccgccttatcaagctcattctcatatccttcaaccacatttgctgaataaaattcggccatagcccctgagccataagaaaataatccaattaaatcgccagcctttaagccaccattctcaagtaaactaagtaaacttaagtataaggatccagtataaatattaccgacattggcatttaattctttagacgcagtaaaactatccattaaacgagcatttgtttcttcatctactccctcaatagctaaacgattagccttcaaccccatcttagtaaaaggcaaatgatatgcaatagcagcaaagtcttttgtctcaagtcctttttgtctcttataatcagaaaaagtatgtttaaaaaagtccaaataaacttgagttgaatattttccatcaactttagcagtttttgaatagttggggcgccaaaaatcattaatatcttcactataggcgctatgaccttcattaagctctagaattcttggattgctagaaactaataaactaacacttcctgctccttgagtaacttcaccagccgtattgatcccatagcgagcaatatcactaccgataacaattgcagtttgatcaggatgaagtcgtacaaagtcttgagcaatcattaatcctgctgttaacccaaagcaagcttctttaacttcaaaagccctaacagctggatcaagttttaaagctgattttacaaataaagaacctgatttagattggtcaacactgctttcagtaccaaaaattaaaagacctacctttgattggtcaattttatctatataccgtagtgttgcattaattcccattgaaactgcatcttgagttggatcagccacactcatctttttttgaccaattccaattaaaaatttatttggatcttggtttcgtgcatgagccaaatctaccatgtctacatacttatttggagtaaaatatccgatttgatcaattccaaccttcatttaattcttttcctttcttatttcatttaaaaatcttacggcggcttcttgagtgtattgtctactttcttgtagcttttctaaaacttttgctttttcaccttcattagccctcaaagtagctactaagtttcttgcctgtaatttcatatgcccagcctgaattcccttagtagaaattgctaacaatgctgaaaaattattggctaaaccagttgcagcaataatctcagccagctgcttagcagacaccttacctagtaaactaaaactctgctgaatatctttacgagccttaatggagccacccactacgccaattgctaaaggaatcgttactgttccaattagtctattatttttgattttccacttactaagtgaagtatagctaccacctttatttgcccatacagcagttgctgcttctactcctcggtaatcattacctgttgctactaagacactatcaacaccattcattattcctttattgttcgttacagctcgataaatatccatttgaccaatttcactaagtaaagctatttttttagctacttttggtccgccaacgctattgacctccaaacttactttagctgtagttaattgggtcggataattagacaaaatcgcatacatagtttgttcaacatttgtctgtttctctaacctatttcctaaaaattctaaaatggcattcgttttatttgctcccattgcttctgcgggatcaactaataccttaagaaaaactaaattatcttttctagaagcttcaatttttcggacaccgccaccatgcttaaccaagctagcaaattttcggttagctaggtcaattaacttcggaaattctttagtaaattcaaccaaatcaaaattctgagccacttctaaaacgatttgtccgtagataccatttctaatgctaactgcttctactccaccattttgattaaaaattttacttgcatgattagctgctgcaacaactgatggctcttccactgccattggtacacagtaacttttttcattaacaattaacttcggtaaaattcccaaaggaaggcgaatttgaccaattacattttcactaagtgtattcaatcttgttaaagtatcagaatctatgttgcttaattcgatccctttttcctcaagaaagtttcttctctcttccggcaaccactgataaaatttctttttagataattcttctgatttcatatgcaattccttgaccgccaccaatacataaagaaacaattgctcttcgaccattgatcttacgcaaactatttactgcacttattactaaacgcgtacctgtcgcacctaacggatggcctaaactgattgccccgccagcaatatttagtttttcttttggaatgtccaaatcacgagctactgcataagcttgcgccgcaaatgcttcattaatttcgactaaatcataatcatcaattgtactgttggtttcttttagcaatttttcaattgcaaaatatggtgcataccccatataagcaggatcacagccaatttccgcataagcacctaaataagctaatggcgttaagtccaaatcatctaacttttgttggttggcaagaagtaccatgcttgctccgtcagttaatggggatgagtttccggctgtaacacggccattttctttaaatacaggtttgagttgtcccaaagcatctaaactagtatctggtcgaattgtctcatcatggtcaagaactttctcgtttaacttaacaggggtatactcctcttcaaaccaattattctcttgagcagcataagccttagcatgagaatcacgagcaaattcgtccatatcttgacgagtaacttggtatttatcagcaacgttttcagcagtaattcccattggtttttcagaataggcatccccaattccatctatcattaaactatctcgatatactggattttcatcatgcttattactcttattaagtaaaagaggagcatttgtcatactttcagctccaccaacgacagcaatttcagaatcaccaagtaacatttgcccttgtgccaaccgtaaagcttttaaactagacccacaaacatcatcaacacttgtagcaacaacagattcaggtaatcctgattttaaagcaatttgacgtgcaacattttggcctaaaccagcacttaaaacatttccaattaagatattatcgattttatcttgcgctacaatattctttttcaataagcctttcagtgctaagacacccaaatcgacagcattttcatccttataaaatccgcgatatttgccaaaaggaattcgattcattcccacaatataaacatcttgtaacacgcttccacctcttagtaaaaattattacaatacctatgatagctcacaaatctaagcagaaacaaaaagcgctatatttttaattaattctaaaaaaagactgctaatcaatcttagcaatcttctacaaatatctatttaaaaaatctttgacttttttctgatactgagcaggcctggttgcaaatgattttgcatgtttagcacctggtacaacccatagttcttttttacctttagctgcttggtaattcttatataccatttgggttggaacaaaggtatctttttctccatgaataaagaatattggtcgcctattttttgcaacttgtttgatactactaccatcccctaaaaagtatccagctctcagtctagtaattccgcttaacacttcgactaatggaaaacgtggaaaggctggtaaatggtacaagtccaccgcttcatgttcaacctcgtctttaacattagtataaccacaatcttcaatataggctttgacttgtttgggcattgccagtccacttgccatcatggttgttgctcctcccatactgacaccgaagatgacgattttactgtcagagccatttttttgaataacttctttagcccattttttaatgtctactttttcacgccagccatatccaatatagtttccttcactttgtccatgcccacgagcatcaggtaacaaagtattatagcccagcttatgaaacatggctgcataagatcccattgtgtctttattattcataaagccatgtaaaataattaccgtctttttagaatttgctaccggaatataatttgcatctagctttaaattatcatcagctgatttcattacccatttttgtttatgagcattttgataccattttttctccttgtaaagcggatcagtctttactaactttgtatcattattaataaacgacttatgacctggaacaacagcaacctgataaaaatatagacctgcaattataaaaatactacaaactactaaaatagagataataataatttttattttcttactttttatcttcattgggagacctctgtttcaaaaatataatctatattatctctagtaaatatagaaatcaagagttggtgaaatattatgtatctagatgatcttttaactataatttctgatcttcatccaagcttggagtttttttatcaaaccagtaaatctggtccctcataccctatcagtaaaattcaagtcgaaggcgatcaatgtttattatttaccggaaaaaaggccaaaacaattgcccaaatcatgcaactgctcggtaaattgaagtctgctcatattcccgtatatgtttatttaaataattcaaataaaaaagccaaagtttttggtgtgcaaattaatttagaaaagggacaagcatatacactataaggctatgaaaaaagaatgaggccaccatgacctcattcttttaatttttatccagatatttatttaagacctgcaatacaccattatcgttattgctaggagcaagatatctggcatgttctttcgcaatttccatgccattttccatcgcataactatacttagcaaaatcaagcattgcaatatcattaccactatcaccaaaagcaatcaaatcttcactggtcaaattaaaacgagcaagcagattttttaatccagtagccttattaattccatatttaactgcatctatggctactggattagaagcaaacgtagtgacaagatttccatattgctcattaaaatctcgctcaatagtttttgcaattttactatcatagtgaaaagttaactcaataaaaacgtcatcgggtaaatcctgccagtcactgatttcagtactttttttagcaaaatattgcaaaaactctttatcctttgcaggcgcttcagttccaatataggctttttttctaccgtaagccattgttgccatactgccatatttatcatggacaaaattaattaaatcgatagcttgttgtttacttaatccttcaacagcaacttcttttccttcgacaattaatctagaaccattagcagttacaaaatccattcgatcaataaattctggaaaatcattttttagacgagcaaatggtcttccactagctacaataaacctaatatcatgtttttcgagtttagttaaaacttgatcaaataattgatgatcataacttctctgatcattcaaaaaagttccatccatatcaacagcaacagctttaaaaggaattttcattttttctccttactaacgacggctcagggcactattcaatttcttacgatagacaaaataaataattaaaattattggcacaatcactaataagacaggataaaagtaatctggagctaaattttgagcggtcacgcctccgatcattggaccagttgccattccaatatcaagtccaagataaaatgtcgaactagctaagccttgttcttcaattggggctaacatcaaagccgttgattgattaaccgaataaataactccataaccaattgaaagcatgatagcagctaagcccattaaccagttattaaccataaaactagcaataattaaaaataaaatcattgctattaggcttagccaaaaccaaaatccaaagcgaattaaatcgaaatattttttcaaaccaattctaatcaagagtaaagcaattgcataaataacaaaaaaataacctaccgcaattgaaaaatgttgtctttcaacataaacgacaatatcagcttgagtaataaaatatggaattgcaaagaaagtagttaacaaagcaataggaatagcatctttttgaataatcttaatttttcttttcttactactattaaccttaggcttagcatggtttccaacaaattggatagaaataatcattaagattgcagcaactacagcaagccaaagggcagacttataaccaataactttatatagattaatcgctaaagcaggcgcaagagccatcgctaaagcattcatcaaaccataaaagcccattgcttccccaacatgactacgcggaactagaaatgctagccaagttgtcatacaaacagttgctaaaacaaagccagtaccgttaattaatctaaaaattagcaaccaattacctgaaggtgagaagcaataacctgcaaccccaatcaaaattaatactccgccaataaacgataagctatactttgaaaagtgatcagttaagttaccagctactggacgtaaaaacattgacactacactcataattccggttataatgccagcaaatactgcactggcacctaaactgattgcatagccattaattagcggcgttacaaacattactgaaaacataaaaaagaaagacgctgccataactaaaataacgtctttagtataaatcgattgcttcttttccaatcgcttaacccctctctaacatacctcttaactttatcacatttttcatccaatcaaaaaagccagttgaaattactcaactggctcaattatcttttttagttaattaatatcccatgtaacggtctctttcccaatcagaaactgattgattatatttagaccattcaagattcttagaatcaataaaactttgagttaaatgttcacctaaagctttttgaattagtggatcagctttaaatgccttaacagcattatgcaaagtagatggaagtggcttaataccacgttcagctctttcttcttcagacatttcaaagacgttagaagtaataggtgccattggtttctttgcttccttaataccatttaaaccagcacttaagcatgctgctagcaaaagatatgggttagctgttgggtcagctgaacgcatttcaagacgagtattaatttcttcagcatccggaattctaacaagtggcgaacggttctttgaagcccatgaaatataaacaggtgcttcaaagccaggaataagacgcttatatgagttaacagttggattaccaattgctgtaattgcgcgagcatgttccaaaataccgtttaagaagtaaagagcagtatctgataagtggaattcaccatctttatcatagaagacattcttaccgtccttaaacaaagacatgttagtgtgcattccgtttcctgcttgaccttctactggcttagccataaatgtggcatataaaccatgctttcttgctacttcacgtacaaccatcttgaaagtttgaacacggtcagcagtagtcaaggcatcatcaaatctgaagtcaatttcttgttgaccgtctcctacttcatggtgagctgcttcaacttcaaaaccaatgctctctaatgtttcaacaatatcacgacggcatcttgcaccctcatcatcagaagtcatatcaaagtatgaagcatgatcaggaacttcagtagtccaattaccatcttcacctaacttaaataaatggaattctgcttcaaaaccaatatcaaaatcagtaaagcccatgtcattcatttctttaaggatacgcttcaagttatttcttggatcgccttcaaatggttcaccattagtcttatgaacagaacatactaaacgaccaatctttcctcccttttcatctccccaaggcaaaactgcccaagttgaaaagtcagggtataaaaccatgtcactttcttctagacgaacaaagccatcaattgaagagccatcaaaacggatatcgttagttaaaactttatctaattgactagttggaacttcaacagccttagaagttccattaatatcagtaaaagctaatcttaagaaacgaacatcgttatctttaacactctttttaatatcttctgcagtaatagttttactcattgtacacacctattctaaaggattacacctgttccaagcgattggtatagtccttaaaaatctattaactacttgtgctaatgcacactgaaaacaataacaaactagattggtctcgtcaatcagtattaatatttttttagatatattttaaactgtttgttatgaatataccagtaatatcctatcataaccataacttttttatttatttaaaaaactttttatttcatttaaagctctctctgacacctctttatcttgtaaaggatctaaccagacaacagataattgatgcttaaaatatgtcagctgacgtttagcatactttcgtgatgcttgttttagtttatttacacattcatcaagcgttttttcacccgagaaatatggaaaaaactctttatagccgatcgcttgaattgcttgatgctcacgagcacggttgtcataaacaaattttgcttctttaagtaagccagcattcatcattttatcgacacgtttattgattcgctgatagacttcttctcgattactatttaaaccaataatcaaggcatcgtatctaggagaaattttggcttgctgctgactaaataacttacctgttcgactaattacagttaatgctctaagagttcgacgactattttgtggagctatttttttagcagcaacaggatccttttcatcaagaagttgccataatttttctgcaccattgtcttttaaatatttttcccacttagaatccacacttgtttgataatcaccaggctcacctaattgaagcttgtttaccaaggcattaatataaaaaccagttccgccaacgactagtggaatagatcccttagctgcaatttgattaacagcttttttaccttcagcaacaaaatctttaacagaatattcatcaaaaatagagcgctgattaaccaaataatgttttacttgtctaagttcttcagccgtcggcttagcagtaccgatacttacttcttgataaatctgcattgaatctccagaaatgatttctgcattaattttcggagcaagtttcaatgctaattcagtttttccaattccagtaggtccaatcaggacaataattttttgcataaacaattcctcttatttcttggtatccattctaacaaaaaacgactatttcttcagacttaatatagcaaaaggctttatcgaaataagaattattgctaaaatttgagttgataaaatatttttttagggaggcattaaccatggcaaagaaatttggtgctggtgtcgtaactggcgttttagcaactgttggcgcacttgctgcaggacttgctacttataagaaaaagatagtagaacctgaacaaaaagaagctgatagaatcgaacaaaacagaattaaagccaacagaaagagttactcagctcatcaaggttaaataaaaaagagagattaatccctataacagaggttgatctctcttttagtatttagaagacttagtttggccatcccatttttcaaagccatcttttaaccaatatacttttttatagccttttttctgcaaaaagcgtgctgctctgacagttagagcacttgaatcagaataaagatatactggtaaatctgggcgaatttcttgatattgatatttaaacatcgtataaggaatgttacgtgctcctagaatatgttctttcttaaaggggcctttttcacgtacatcaatgatttgtgcttttctcttacctttttcaaactcttcattagttaatgcaccaccgacacgcttggattgaatccatgtccaaagccaacttaaagcgaaagccaaaatgatgatgattaagacaatattgatgatcccaaaaatattcattaattacttactcctaatataagaatttctatagtactataataatctattactatcttttgtgctagtttccttttcttcttcaatttcatgctcatgacttaaaatcaactcagcattcatgtattcttttttagaaactacgccagcatgatacaaattatctaattctattcccattaattcaatatcccatttacgtttaccaacataaacaatgatattaaacttttttagaagtttttgaacatcgtgtaaatttttcattattaattattaatcactattccctgatgtaagcaaaatacgacataaataattgtaataactgctgcaataactcttaatttatgatgatattgtcttaaatgtgcactaccaaaaattattcccaatagaaaaccagatattaaaccacctaaatgacctaaaatatcaatataacttgcaaataaatcaagtgccaaattgataatagctaaggctaaagcctgctttcctaaataattaattgcaggaattgcacggttagctaaataaagcgcgataactactccaaaaagtccaaataacgccgttgaagcaccagcactaactacagaatcactgccatacgcataacttaataaattgccaccaattcctgacagcaaatagacacttaaaaatcgccagtgccctaacaaaggctccataaattgcccaacgtaataaatcatcacagcattagaagcgatatgtagccacccaatgtgtaaaaattgagcagtaaacagcctccaccattgatgttcaacagtaacaagctgattattcattgcacctaagcgaagcaaagtattaatattagtcgatccacccattattgtttcaaggataaacacaataaagagcactactaaaatagtatttgtaataaatgtgctagaaaatcgaccaaattttaatttttgcatctcgtctcctctttcttatttaactaaaattaacttctcaatcggaatatcatgttcttcaacccgccatgtagtttgcttaaagaattgggccgaattggctaagctaagcgtttgagttggatacttttctaaaaagcgatcgtaatagccaccaccaaaaccaagacgactatttctatctaaaccgtaagctagaccgggaacaattattaaatctaagttattattcacaatagcttctgaatcatgattttctaaaacaccaaacttagttttaactaatatcgtatttttatcataaagtgtaaattccatcttcctctttggcaagcagcgtgggatatatactcttttccccatcttccataaagaagcaataataggcgctgtattgacttctatcggcattgaaacagaaataccgatagactctgctttagttaaaagcgagcttctaagtaacttttcctttaagattttatcttctgataatttttgcttactattcgcaaattcagttaatttctttatttgtaattttcgtaattcttttttactaattaaatgcattaaataatatctctggatacaaaaaaacaacaggaattgcctgttgctttgattacttagtttcgcggtgaagtgttacctttctttcaactgggcaatacttctttaaagctaaacgttccggatgcttacgcttattcttttcagataagtaacttctatcgccacattcggtgcattcaaggataatatgttctgccatcttttccaccacctacttatttagttaactgttaaactataccatgttttgcatacttttaccagtacttttctatttattaagcttgaagtagtcttgaaccattgctttagcaacttcaagagtgtacttaccttccttatcagaatcaagtcctgggaaaacaactgcaactgcaagtttaggatcttttgatggtgcataaccaacaaaagtagcgttaataacttctggagctttaggatttcccgggttatcttcatcataatagaaagtctgagcagtaccagtcttaccggaaattgaaggcttaacatccttcaatgagtgagctgttccccatgagttagtaccatgaacaacacgataaaatccttgatgaataacatcaagttgatcttgcgtccaaggaatacgcatttgaacctgtggcttattgttatagagaatagaaactttgtttccttgagcgttagtttcaccaaccgattgaactaaatatggacgcatacgatatccaccattagcaatagttgaaacatattgaactaactgaattggagtataagcatcatagtttccataagctaagtcaagcacagaaccactaagtagttgccccgccgaattatatgagcgaccttgaataccagatacttcacctggaagatcaactcctgtcttctgtcctaaaccaaacattgcaaagttacgtcttaactttgtaaatgcatctgaaggcatagagataaagctatgtggtgtatattttgcattaacccatcttagagcaagctgcatcatatagatgttacttgatacttcaagcgccgttggagcatctaagctactaaacgtaccaactggataaacagattttttaattggtgaccctggtaagtaaattggcgtatcaggcatcacactgttagtcggcgaaataataccattcattaatccacctgcaacagtagcacccttgattgcagatcccataacaaatgatttattaattacacctaacgcatcatctgtattcttaccagttttcgcattatgatcaatacctgcaattgctaaaagcgcaccagttttagggttcattgccacagcatatgcaccgttagagtactgagtagcgccagcagcttgagcagaagcatatacttttttcagagtcttttcaacttcttgctggtacttggcattcattgtcaaaattaggcttgcgccgctttggcccttatatacagtcttagtttgttcaaccccatctttagccttagttactacttgtgacttagattttgtacccttcaaaagtggttcatacttttcttcaaggtaactagtaccaactcggtcgttacgtgaataaccttgagttaaatagtattgtaagttatcgcttggtagacctgctttttctgaagaaactgaaccaataatactcttaatcgattttccgtttggatagcttcttgaccagtctgttccaatacctacaccaggtaattcagacaagtgttctccaaccaacgccatttcacgatcagttaagcccttgtttttaatataaatagttgaaagtgtatatgcaccagaaatcttattaaaaattaaagcggctgttttttgacgcttagtaaaatgaatattctgtttttctacacgctttaagacattattatatatttgacttgaacttagtgcgtctccgttactgtcatagcgttcagatttgggtaattttgctgtttccttttctgaaattttactattagctaagtaataatcatatagctgtctttttgtaggtttttcatcatcaagtgttatatattgacttaaacgattagaaactttatatatttgactagacgtaatgctagaatttttggtataagtaattgcgttattggctttattacctaccaaaatcttaccgctactgtcatacatcacaccacgtggtacgttattagatacaattttttggtcggtttgttgtacttctgcttgaaaacgaccaccataaaagagttgcaagtaagctaattgaccaattaataataaaaataaaactaaaatgacgcccaaaataattttcattcttaggggcgtcgaagtggaatttctattcgaacctttactttgttttaaataattcaaaattctaacctcactaaactagaattgattttagcaaaaaacggatctaaattctatttttctatcaatgaaaatcgcaataattatatattcttaagaagtagggacactatcaatgtttatcaccaaaattaaaatacattttaaaaataaatatctatattggctttcttttttactacctgcttgtattttcgcaagctactttatatatcgcaatcatgagattcttaccgttgatttaggtcagcaatatattgattttttagctttttataaaaacaacttattttctaatccgctaaattttatttttacgtttagtagcggattaggcaattcttttattggaacctgggcttattacttaactagtccctttaactttttattattaatttttcccaagtcgcagttacctgaagcaatacttttaattattagtttaaaaattggaagtatcggattaagcggtttttattattttcaaaagttttttaacggcgataataagatctttgctcttgcagctagcctagctttctcattaagcggatttgttgttagttataacttaaacttaatgtggcttgacagcctaattttgctacctctattacttgacgcgattgataaattagaagacaaacgccgacactacttctatcttaccatgatcacttttctattatggcttaccaatttttataccggcttcatggtgctttttttcggcttactttactttattaatacgctactcaattcttctttttctaaaaaacaaattatccttcaatatgttactaaaagtttttttggtactagtttagctgcactcatattactaccatcattctttgaaatattaaatggaaaaattcattcagatactaccttatcaatgggatttcaatttcctccatatcaaacattttacaaattaactattggcgcctttaattttactgaaatggaaaaaggattacccaatatctttttaactagtatctttactcttctgtgtattctctacttcattaatcaacatttttctattaaagaaaagctattatctgcgctattactaacattcttatttttttcctttagttttaaccctcttatcttactttggcatttaggacaatacccagtttggtatccagctcgctttagctttatcttttctttttatgcaatttatctcggagttcaagttcttgcccatacacaggaatttagtcctagcagcaaaataatttctttacttttggtaattagcttaagctcttttcttttcttaaatcttcatcaaaaagaatttttaaatcaaacaaatattattttaactattctctttttattatgtagtttgttaattcttttatttttcaactataaatggattccggtaatcttctttggcattgttggtcttgaagtaagtatcaatttgatagctagtcttgataatatttcttatcaaaaaaactttgactatactaatttcactaaaaacatctctgaaagtacggcatatttacataaatatgactctggcttatatcgaacagaaaagacttttacacgttcagatgacgatcctttaagcaatgactattatggcattagtaatttcaactctatttctgaccgttcaactattaatttaattgactatttaggtcttgaaaacaatgacaactcttttactaataattttgctactcccttatctgatagtattttaggcattaaatataatatcgttccgatcaagaatcgaagaaaacttcccgcagaacaacaaatagtttttactagtgcgttttatcgacctgatttgattaggaataaggttgtcaaaagttttaaacaggtacaaattagaaaaaattcttcagctttaccacttatttttttctccccttcacataaaaaaataaacttttataccagtatgccatcagctaatcaaaatactctttttaatagcattgttggtaaaaaaattaatctttttaatagcttatatttaaccaatcctaataagatagaaaatattaaatccactaaaaacgttaatgaatatcaaaaaattaacaaaagcagaattgcaacactttcttttaaaatatcttcttttcaaaagggaccttattatttagaactcccttcaaatctagatgcagaatctgtttctattactgttaatggtcatcatcttaataatcaagatttgggaatttcaaacaaattattaaatattggttattactcaccaaatactccaattaaaatcactttcaagttaaataatgaaaaaactaatttgagcggaattcgagtactacaatttagagagcatgaatttaaccaaattattcgtcaattcaacgaaaaacagcctataactcaacaaactagtcctatttctttaaagcttaattacactgctagaagagataaaattcttaattctactattccttattcaaaaaactggctaattttagataacggcaaacttcttaaaacggaaaaatttgctcatacttttttgagtgccagactaagcaaaggaaaacatcatttaactttgatttatattccctttgccttcctaattggacttataatttcaatcgtttcacttataattatatttattctcaagccaaaaaagacttaacgtgcaagtaagcaagttaagccttttttataagcgagtaataattagttcaatgttttaacatcgttgatagtaacatcaaatgttccaccaggagtgttaatagttactttttcaccctttttcttgccaagtaaagcttgggcaattggtgaatcgttagaaatttttccgttaagcggatcagattcatcagatccaacgatagtataggtttctggatcatcagtacctacttctgtgtaagtaacagtcttaccgatagaaacttcgttaggatcaacgctatctgcatcaacaacttgtgcatacttaagcatttgttcaatttgaacaatacgttgttctacagcactttgctcatcttttgcagcatcgtattcagagttttcggataagtcaccgaatgatctagcaaccttaattctctcaataacttctggacgttttactaattttaagttctttaattccttctgaagtttttccttaccttcagcggtcattggataaactttttctgccatactaaaaattctccttacctatgcctattattctttgcaccaaccagcttatgttttctacttaaaaaagtcaaccatttttactggcctaaactactattacgtttcaagtgctcgtcataattttcattgtagtaaaccttaccagtcttaagatttgcaacaaagtagagatagttagacttgattgggtttaatacagcgctaattgaatctaaacttggattattaaatggtcctggaccatatcccttgtgaacatacaagttatatggagattctaccttaatatcctttagggtcaaagaatgtttatgcttattcagtgcatacatgactgaaatatcagattgaagcggcatatttgctttaattcggttaaagaataccccagcaatcattcgacgatccttagacttaacaccttcacgctcaactaaggaagctaaagttaaaacttcctgtacagtcaaatgctttttcttgatggaactatagtatggttgtaaaacttgatcagtcttatcaaccatttggttaactagttctttcaaagaagctccttgatagacatcatacttagccgggaagagatatccttctaagtgataacgaacacctttactgttcattgaactagttaaaagtttaggatattgcttttccaaactcttcataaagctttgatctttcattagctttaagaagtcttgacggctatatttcgtattcttaccaactgttgtagcaatactatcaatcgtttgcccttcttttatcaaaacgtgaccgacaactggacggccacctccaccttgcaattgactaacgatttctttgttatgcatcgagggtgagagatagaaattacctgcctgaaaattggttgcactatggctctttaaccaaaagttaaagatagtcgcatttctaataatctttttctcttgtaaaatctgagcaatctgactattagttgcacctgcaggaatatgaacactgaccacatctttatcatgacgattggcaggctgcagagcataaccaacataacagcccccaattaagataaacaagactaaaatggcacctaatccgctaagaatccagcgggtaaccttttttgatgcttgttcttctaactcatgatttttctttttgtcctgatttagcaaacgcttttcctccgaaaatcacaaaaatctaagacaattatagcaaagctccctggaaaagaattaacgaactttaatctttaaactttctttcagatctgtttcaattttttccattgctttagtaactacttcatcagtcaatgtatctttttcattcaagaaagttaacgaatatgaaattgatttatgtcctgattcaatttgactaccagcataaacgtcaatgacttgaatatcatgaagatacttaccaccatttaatttaatttgagcttcaatttgggcattagttactgcatttggcactaataatgataaatcacgttcaattgctgggaacttaggagcagctttagctttcattcccttattaagcattgaaacgattgtgtctaaatcaatttcgtagccataaatttcacttccacgtaatgccttatcaagggtagtaacagtatgagcaagcatcccaattaaaccaacatattgatccttaatgtaaataccagcagttctagttgggtgcataccaacaataacttctgcacgatattcaacatctgcatccttaatcccgattgccctaaataagttagttaattgaccttttacaaagtagaaatcaatcttttgatctaaatgttgccaatttgctgacacagtatgtcctgaataaagagcagctaaatgttcatgttcattaaaagtattattttcatgatcataaactctaccttgttcaaataaagctaattccttttgcttacgagccatattatagcttgcagcatcaactaaaccagttaacaagttttctctcatagttgaacgacttgaattcaatggccattgaacttctacaaccggcttaggatctttagtaaatgaaattgctttttctggagaagtcaatgaataagaaatggcttccatcatgccttgtccttgaacaatatccttaattctacgcatagcagtttctttttctgaatagccaccatgtgtctcagctaaaagaggttgagtagactttaagttatcatagccataaattctacctacttcttctactaaatctgctggaatagaaatatcccatcttctatttggaactgtaacaactaattcatcttccgacccatcaacagtaaagcctaagcgatcaaaaatcttttccatttctgatctgcttaattctgttcctaataccttgttaatgtatgaaactgtagtcttaactactgaaggatttctttgcacatcagttgccttaatttcaccctcattaacagtaccatttgcatcattacgtaataacagagcaacaatatctaaggctttttgagtattatcccagttaacccctttttcaaaacgacttgaagcttcagtacgattggcatgacgtaaagcagattttctaacgctagttccatcaaaaatagcagattctaaaatcacatcagtcgtatcatcttctacttctgaatttttaccgcccattacaccagccatcattactggcttttgaccatcggtaataataatatcgtttggatctaattcaacttctttatcgtttaataaagtaagcttttcacccttgttagcttttctaacctctaatttaccatctttaaaagtacgagcatcgtaagcatgcattggttgtccagttaggagcattacatagttagttacgtcaactacattattaattggtcgcaatcctgcattccaaagacgtctttgcatccataagggactctcgccaatcttaacatttgaaacttttcttaagtaaaacttaggtgctaatttttcatcaactttagcatctaattcattagtccattcaggaccatctgctttaagaactactggctcaatcttaggctttttatcaacaattgcgccaacctcatatgctgcaccttccattgataaagtatcagcacggtttggtgtaatatcaaagtctaaaatgtagtcatccataccaagtgcttcataaacttcttcacctggctttacatcagaatctttaggaaagacaaagattccatccacatatttttgaggaacatttttatctgcaaaaccaatttcttgaagaccacaaatcattccatttgatttaattccgcgaattttaccacgcttaatcttctcattacctgcaattctggcaccgtgcaaagcaacaatcacatcttcaccagctgcaacatttggagctccacaaacaatttgaattggttcgtcttcacctacatcaacttgacacttatgtaagtgagttccttcaatatcttcacattctaaaatgtgaccaactactaacttttttaagccttctgctggatggtctactgatgcaatttcgacaccagttctagtaattttttctcctaaatctttaggatcttcgtctaaatcaagaaaatctttcaaccagttatatgaaacaagcattaatcttcctccttacggaattgtgctaagaaacgaacatcattagtgtagaaatcacgaatatcagaaataccgtatttcaaaattgcaaaacggtccaagcctaaaccgaatgcaaaaccaccataaacagttgaatcaacacctgcgttttctaaaacgttagggtgaaccattccagcaccaagtacttcaatccaaccagtatacttacaaattggacatcccttaccatcacagttgaaacaagaaacatccatttctacagatggttcagtaaatggaaagtatgatggacgaagacgagttttgcgatcttgaccaaagacatgcttggcaatcatttctaaagtacctttaaggtctgacatagtaacatttttatcaactactaagccttccatttgttggaattggtgagagtgagtcgcatcatcatcatcacgacgatataccttaccaggaccaaccatctttaatggccctttagaaaaatcatgcttttctaagactcttgcttgatcccccgaagtttgagttctaagcaaatcttcattatcaatatagaaagtagcttgcatatcacgtgcagggtggtctttaggtaagttcatcatctcgaaacagtagtgatctgtttcaatttctggaccttgtactaccttatatcccataccaatgaagtaactttccaaatcatccaaaataatattgattgggtgctttgaacctaaatgtccttcacgtcctggtaaagtcacgtcaatcttttcttcttctaatttctgagcaattattgcctgtaagaaatgatcttttgcttcatctaattgcttttgaagaatatcacgaacttgatttacttcttgacctacttttggtctattttctggagcgatgtctttcattgagtgcaaaatctgagttaattcacccttgcgccccattaattctactctaatcttatcaagcattttttgattttcagcttgcttgatttgatctaatccttcttcttttaacttatttattctatcgaataagtccatctcattttcctttccaacaaaaaaagctccgtcccaaaagggacgaagcttcgcggtaccaccctagtttgaactagcacaaaaaagtgcgtgttcacactcttttcatataacggtgaaataccggaattgattagattctgctcctaagatgaaattcatgcttttatcttaagttttttccaccaataaaactctctctaaaaagatatctgcattactaatcttaatcattgcatttaagtataatagtatcttaaatctttttacttaactttgcaatcatcttcaggcccatttatcagcccaattatgaacttgttcaaaaacaggctgtaagtctgcgcctttctgggtcaaagtatagctaataataccgctcttttcatcaactgtacgattaacaataccgtccttttctagttctttcaaacgttccactaaaactcgatcagaacacttactaatacaacgtgctaaatccttaaaacgcattgcattagtatcgcacaaagagctgataattaaaccattccattttttaccaataattgcaaaagcatcaataaaatgcgaacacagtgagtaatcttctggatctggacagtcacccattttagttttgctttcaatttcttgggacatctataattcctcctaaaaaatcaaaatattttagatcaatctatactaaagattatagtaatattacttacttaaaacaagctgtaagcttatgaaaaatgataaatcataattcctgctgctacagctgcatttaatgactccgccttgccttttattggaatataaatctttttatctgctgtctcaatcacatctttacttgccccatgggcttcatttccaattactaaagctaattgaggaacaggaatgcaattattcaacgattttgctgtcttatcgagaatacttacataaactggaattccattttctttaaagctactaattgcttctaagataggattttgaacaatctgaatatggaattgactgccttgcatactacgctgaacttttggattatacaagtccacactttcttcagaaagaacaactccatcaaatccggctgcatcagctgtacgaataatagtaccaacatttcctggatcagttaaattatccaaaacaacccattttccatattcaaaactaaatgatttaggttgattaattggtaaaaccataaaaatatcttgactattcttagtactgctcaaatgctctgcaattgcatcagtaattttaattaccttatcatccttcagtctataactagtggtaagtttttctaaagcttctgatgttcctaaaatataaagataattttcgtgattcttgagtgcctcttcaactaaatgaaagccttcaattaaataagtttgagtctttttacgatactttttctgttctaactttctaaggttcttaatcgtgggattatttactgaattaatttctatcataatttctacttccttctaatctaatattttaaattacctcgctcaaaattaacatgttaaaatttaagttagaagataaagaaaagagcgatatttatgaaaactgtcacaatgaaagttaccggccttgtccaaggtgttggctttagatggaccacgcaaatgattgcacaagatttaggaattaccggaactgttaaaaataatcctgatggatcagtttctattgtagctcaaggggaggagcttcctttagaacattttattaaaaaaattaaagcttctccttcagtagctggacatgtagatcatgttgatttaaatacagtctctgatgcagaaaaatttactcgctttagtgtggtttattgatactttaacaaataactagtaaactttattccagtaacaataaagtaggaaaggttatagttaatgaaatcaaaaactaaatattttagtctatttgccatgctaactatcttggcattgatcctaactggttgtgctaataatagtcaaagtatctatcaggcacctaccagcggaccatatgcctgggtttttagtctttttggtaagccaattcaaaatatcatgttagctgttgagcatcaaatcggtggctcaaacggtgctggctgggcaattattatcattacttttgttgttcagttaattgttatgccgcttcgtcttgcatctcagcgcaaaatgactacgcaacaagaaaagactcaaaaacttcaaccacaaatgaagttgattcaagaagcacttaaaaaacccggcttaactcagccgcaacaaatgcaaattagccaacttcaaatgcgagtttataaagataataatatgtccatgatgggtggaatgggatgtctaccattacttatccaactgccgattatgattgggatctatcaagcagtcgcttattctaaagaattagccgcttcaagtttctttggtatttctttggggcaacgctcaattgtcttaactatcattgctaccttgctttatgtaattcaaggttatctatcaatggttggaatacctgaagaacagaaaaaagccatgcagatgactctaattttgagtccagcaatgaccttcttcatcagtatttcagctccgggtgccttagcgctttacttcttagttggtggtttaattgctattttgcaacaagtaattactactttcatcatcatgccaaaagtaaaaaaagacgttgcagctgaattgaatgaacgtccccttaaggtggtagtcacgcaagaaacaatcgatagtattcttaatactactacttcatcaaatactggtaacgaggcagaaaaagatcttcatcaagatttgcgtgcacgaaatgctggtaaacaaaaacgtcctcataactctgataaagattaataatcaaataaaaaggaatctacatagattcctttttatttatcatttattttctgatttagacttcaacaagggaaattcaatcataaacttactacctgaaccaagtgttgaactaacactaatttttccatggtagctttcaactaatttttgagcaatagctaaacctagaccattaccacctttttcacgggttcgagctttatctacgcgatagaagcgattgaagattttatcctgctcatcaggtgcaattccttcgccaaaatcttggacagaaattttaaccttatctttttcagtagcagcatctaccaaaatttctttgcgatccgtggaatacttaattgcgttatcaatcaaaataatcaaaatctgctctaaatggttacgataaatcttgataattgtatctggtgctaagtcgctgtcatcatatgtaattgtaaaatcttgatgaatcattctcatatcattaactgttcgattgagaacttcgttaacatcagccgttttatcaggatactgtaaatcaacttgctcagctctagttaaatcaagcatctcttgaatcaaatgtttcattcgtttgctttcttgaagagaagcttgaattgattcttctaggacttgcggatcatcttttccccatcgttctagcaaattcaagtgtccctcaataacagctaccggcgtacgtaactcatgagatacatcccccacgaattgcttctgttgctgcatatacgcctgcattcgatctagcatctcattaaatgaaatagctaattcacctaactcatcatttcgatggagatctggaactcttcgtttattagtcggatcttcattaatatcatgagaaatctgtgacatttttttgatcggctgtacaacactattaacaatcaaataggataaaccaacaaaaacaataattgcaataatcgatagaccaatcatccaattacgaattgattttaaaacatgattttgttgatccatcgaattatcaacaattaagtatcctgttaatcggcgtgttttatcagaaaaaatcttctgataaattttcatatggatttttccttttgtggtttctacctttaaaacatgattctctgtcttgctaaaatgaggcattccattatcaggaacatttccattactaaaaaccacatctccacttgggttataaatagtaatacttgtatctcgattcgacaaagtcgctagcacatcatcattaaagacatttcccccatcatttgaagtaataggggtttgaccttccaaaattcgattagtattaggcgaaagctgaggaactacatttgaaatctggagacttgtcgggatttccaccaatcttctctgaaaggtggtagcgacactttcagtcaaatttctttcctgcgaaacaatttgctgtttcaccaaagaataaattgcaattgaaaatataacaaaagagaccgtaattgtcgctgcaactaagcttacccacttaaaggttagcgaggacttgagggtctctttggtagatttattttgcttcttcacgtgcttcatcattttcatccgttcttaccatataaccggtaccacggacagtcttgatgtatgaaggacggcccggtacatcgattttattacgtaaataacgtacatatacttcgacaacattagtttcaattttagattcaggtccccaaatcttatttaaaagttgctctctagtaacaacattatttttattttcaattaatgtcattaacaagttgtactcacgcttagtcaaatcgactgtactatctccgcgatgaacgatgcggttagctgtttcaatggttagatcattaaaatgaacaactttttgaacccccatcgtatcgcccatagctctcttttcaatttgtactcttcttaagactgcacgtaaacgagccaacaattcttcgattgcaaaaggcttaacaatatagtcatcagccccgtgatctaagccagaaactcgatcaattactgaatctcttgcagtcatcataataattggagtagttttttcttggcgaacgcgacgagcaatttctaatccgttaagatccggcaacattaaatcaagtaagattgcatcgaagtcttcgtttaatgctaaatctaatccttttcgaccgtttccttcaacttgagtttcatatttttcatgtcttaattctagttctacaaaacgggcaagatttttttcatcttcaataatcagaattttactcattattttctccactactatattaatctggttaaaaattttattaataaattaatattaaatttaaaaatacattaatgcaagaggttattccttgtttttttcatctttgaataaatctttaagcttagcaaaggctggattttctttatttgattgttcttcttgataagccgcttgagaaataaccttccatccttttccttcagggaaatcaccttcatttttttcctgaggagtcaggatcactgatggcaaacttaataataagttatcttctacagctttttgaagatcaattttatcatctttaacagttacgatagtatcttcttcatcaagttgttcttgagttggctcaacttcactataattttcagtaaaattaaacttttgatgcaattttactggttttaagcttctagtagatggggcaactacatctgcttctacagtgaaattaccagttacaaagggttcatcatagaagaaatcgccactaacatgcacgtttttggcatcttcaagtaattctttacttctatcaaaaaaatctttgcttaactccacatcttcatcagcgtgagtcaagggattacggctatttttaatttgtgaatatgaaaaatttaacattattttacctcgattggtcttcgaccaaagttttgatcttcacccataatttgttcaaaaagtcgatctactcttacttgcaggcctaaagttccactcgctgcatttttcttatcgaccttagaaataattggaagttcaacatctttccgaatttttttaagataatttctcccgcggctgttatagccaagtaataacgttgaaacatcttgatatgaagcctgcatttccttttcagttacatttaaaagagtgtaaagacaaagtcttctaaggcgcgcataagtatagcgtttagacttaatttggcgtaaaaatgaagtaaaatcttccgcattatgaatctcttccttcattttgtactctaagccttcactcatttggtagattgagcgtaattcttctaaactagcactttcaattcgatattttaaaaagttaaataaaagattccaatttgggtagactttttgtttttctagtgctgctagttcacctttaggaagatatttttttaattcaattaaatcatttggatgatgtagacaataatttctaattgctgtagcagaagaaataattttgtcttgcagaagtggatcatcatgtccactccctagtcttgtcacgggatgcaaatgaagcggagtatctagctgttcactagctacagcataagcaacagctaacatcatgttaggctgatttacttcatgacctacttctctagcaaccatttcattatattgcgtagcataagtttgagtataatctctaaaatccattcgatttttaggaatttgatttattttttgtcctagataagaaaaatttaaattagcatcttctacgccaaaaaataattctgatactcctaaattgcttaacattctaatgctaccattagcaaaaatatcagctggttgaactgcaaaagaaaaaggtagttcaaatactaaatcggcacctgaatttaaagctgctttggctctttgccacttatccataatcgccatttgtccacgctgaacataattgcctgacatcataacaattattggatcattttcggaaactaagcgtgcttgatttaataaaaattcgtgtccactatgaaaaggattatattcagctacaatgccaattacactcatatgtcttcctttaatctaagtttaattctaacttcttaccgttgctccagagcttttctaagccataaaagtctcttgcatcttccgtaaacacatttacgactacgtctcccatatctactaaaagccagttagagtctcgagttccttcaatacggtaatcttcttttccttgctcatgaattttatcaataatgctattaacaattgcatggagttgacgatttgaacctgcagtagttacaacatagtaatctgctaggatactaattccttgcatatcatatgcttcagtatcttcaccatgtctctcatcaattgcttctacagttaaatctaataatttcttgctatccaattttatttttcctttcaaaattctaatcctttacagcccatttattatatgcagcaaaagtcttaggatatatcttttttctattagttattaaaaagtcaagcgtatgggctaactcaaaacctaccccatcatctaaattgtcataagccacctttcttgcctcttctacaccaggaaaatcacgtcctggttctataaaatcagcaacaaagacaattttatctaaaatagtcatttcaacatcagctgttgtatgacgtctaattgcagttaaaatttcagggtcagttatctttaactctttctcaatgaaatatgctcctacaatgccatgccaaatagcacgattatagttaagtaagtcttgatcaaagtgttgctccttaattaccttaataaatcgttctggagatacttgctttgcataatcatgaataaatccagctaaagctgctttgtctggatcatagttattaagttcagccaacttgcgacttgttttgcttacaccaatacaatgcttaaatcttttttcatccatattgcttttttctttagcaacaatttcagcagaagttaacggggaatatgttttcgtaaaattaatttcagtcacgatataagcctcttgattcaatatataagcggacactctcaggcactaaataccgaatagaattaccagtagctacattcttacgaattagagaagacgaaatatctaaatttggagcatccacccaaatcattggaaatctcgggttttgcggatagtttggtcttctaactccaactaatgtcgataaaagtgcaattgtttccggttcacgccaattttcaaaatcatttacttcgtcactgcccataatcaaataatattgattacgcggtgctctttttttcagataacgcaaggtatcaactgtatatgaagtgccgccccgcattacctcaaaaagcttaacatgaaaatatggattatcatgcgtagctaattcaagcatcgcacagcgatctttagcactaacgttacctgctagttgcttgtgaggtggagtgttattggggataaaccatatttcgtctaaatgaagttgttttctaacttgctctgccattactaaatgagcaagatgaactggattaaaagttcctcccataattccaatttgctgggcagaacttgtagctggttcaaattttacttgtggcttttcttttacaacacactgcattatatcaacgctcttctaattcctaaaccaatgccttcaggcgtataagcctttactacaacattagctggcgttgtaataaatcctacacccccaaacaaaatatcgcttttttcttttggtgaaaatgtttgtccttttaatggtcctaaacagtcatccttacttggtggaagtaataagtcatctttatgcttttcataaaatgtatcagcattctcagtctttgttctgtgaacataaaggtctcgtgcaacataaattgtaaaaccagatgatggtccatcaacataatcaaagcgccccagtccagctaagaaaattgtttgtcccggcaataactgataagttgctggctttaatggtttctttggttcaacaacttctagttctttgccacttaagtgactagccaactgattagcattcaagattcctggggtatcaattaaataatgaccattagaaagaggtattttaatttcatctaaagttgttccaggaaacttagacgtagtaatgacatcttttaagtcactattcatattgataattgcattgattaaagtcgattttccaacattagtagtcccgacaaaataaatgtctttcttttcacctttttttgctagaaaagccattaaatcagctaaatttttctttttagcagctgaaactaaaaagattttttctggctttaagccatttcgattagcttcttgccgcatccaatctttgatttttgactctttagagtttttaggaaataaatctaccttgttaccgactaaaatatattcattaccgccaataaaacgtttaattgaagaaattaatgagttgctaaaatcaaacaaatcaactacgttaacaaccaaagcctttttttgactaattgaattgagtaaggctagaaaatcatcgttattttcttcaactggcataatttcgttatagtgtcttaatctaaagcagcgttggcaatatacctcattgtcgtcacttgttaaagctttttttaaggcagaagttggtaaataccccgactttttaggatcttgatcctgcaatatacttccacaaccaatacaacgcaattcttcactcattctaatttctccttaaaaactactggctttcttaaattcaaaaagaagaagataaatttttcaaaaaaacgattaattctagtattccacttatcggtttcaactaatggtttcaccaaaactgtagccacaccagctaaattaccagcctgcatatcagtaatcaactgatctcctaccattaggacttgatctttttgtaaattcagttcttttaattccttattaattccaatgggaagaggctttctagccttggcaataaaagaaatatgatatggattcaaaacttttccaattcgttcagcgttattattcgagataacaactaactgaatcccagatttagctaaacgctgattaagttgatccatctcaactgccgtatcagctttattccaggcaagcaaggtattgtctaaatcgctaaaaacagccttaattcccatcttcttcaactgttttggatctaaatgatagatggtatctattgtataacgaggtctaaataacattaaaaaatctccacttttttctcatatctatagtatcagaaatctttaatctttagaaacatttgctgattgaaaaattaaaattttacttttctttagcacaaaagatggtaaaataagaacaatttaaactttttccaccgtattacacaaaggagttaaaaatgaggaattttattgatctccatcttcatttagatggttctttgccatacactactgttaaaaaattaataagagtacacaattttcctactttaactgattcacaattaaaagaaaagctatctgtttctgaaagatgtgctaatttacaagaatatttaactaaatttgactttcccttattgttattacaaacaaaaaaagatctagaaatagcaatttttgatcttttacaacagcttcgctcccaagggttagtttacacagagattcgttttgcaccgcagcttcatacacaaaaagatcttactcaagaagatgcaattaaagcctgtattttaggattaaaaaaattctacagctggcaagataaccacgaagacaacgtttatccccttcatgccaatttaatcctctgtctcatgcgtctccccaatcgagagcaggaaaacaatttaactgttaaattagccgctaaatatgctaataaatatgttgttggtattgacctagcaggtccagaaggtccaattccaaataaaaaatttaagccctactttgacgatgcaaaagaaatgcatattccatttacgattcacgctggagaagctgcgggtcctgaatccatgcaagaagctctggatctaggtactaaaagaattggacatggagtacgttgcttagaaagtgatcaactagttcacgaattagttgaccaaaatattactttagaatgttgcgccacttctaatctcaatactaaagtatttaaaaacattgactcttatccaatcagaaaactactttcaagaaaaataaaggcaacactgaattgtgacaatatgactgtttcaaatactaacttacctaaagaatttaaattacttgaagctaaaactaatcttacaaatacagatgaacatcaattattattaaattccattaatgctgcctttgcttctaaccaagaaaaaaatcgcttattacatatcttcaactaaatttgagaaaaaaatgctccgcacaagcggagcatttttaatatttattagttcaaagctttcttagcagcatctgctaaatcagcaaaagccttttcgtcgttgtaagcaatatcagctaacatcttacggttcatgtcaataccagctacctttaagccgtgcattaacttagagtatgaaagaccattttgtcttgcagcagcgttgatacgagcaatccataattttctgaattcactcttacgcttcttacggtcacggaaagcatatttacgagaaacaaatacttgagtacttgcagctttaaattgtaagtgttttgagccacggtaacccttggctaacttcatgatcttcttacgacgagcgcgtgttacggttccacctttagttcttggcatctaaaattcctcctcaaaaagtcttctaataattaacgcatttgggaaagcatctgtttgatgcgctttaagtcacttgctgaaaccatagcagcttttctcaaatgacgacgttgtttcttagtcttaccgtggaaacggtgtccagtgtaagcatggtgacgctttaaaccaccattagcagttctcttgaaacgctttgctgaagcgcggtgtgttttttgctttggcatatctattcctccaattaactactttttctttttatctttctcacttaatggagcaagcattaagaacattgaacggccttccatcttaggcttagtaactacattagataagtcactagcttcatcagccatcttctctaagacctgtttacctaactccttgtgagtaattgcccggcctctaaagcgaatagaaactctaactttagcgcccttggtcaagaatttacgaacatgctttaacttagtgtcaaagtcattgccttcgattgttggacttaaacgaatttctttgacagccataaccttttgattcttacggttttctttggctttcttttgttgttcaaaacggaatttaccgtagtccataattctagcaacaggtggcttagcattaggagaaagcaaaaccaaatcaaggtcagcgtcagctgctttacgtaaagcttcattcttagaaacgacaccaatttgttggccatcaactccaattaaacgaacttcacgagcacgaatatcttcgtttaagatcatatttcttggtatgagtattcacctccacgttaatttcgaggacaagaaaaaagcgagcaaagttaacgcccgcttttaatcaacagatattatcgatcagcccagaggtaatattaacttaggcgagaagcgggagcttcttcttgttctcaacttctaaattataccatctaattaatctacgtcaagaactaattaaatacaactgctaattttaataaaactaatagaaagaaagagagccttgcttcttcacagctttattaactttttcaaaaataaatagtccaagcaacaaccaaaatatcgaattaaaggctgaaaaagataaataatatttaaaattataagctgatccactaataatcattctcatccaactcaccattggtacaagcggtaaaagattggccatatcctttattaacactcccgctttttcaaattgcgttagtaaaattcccaaatacaaatattgacaaattgctaaaaaacttcctattcgtttaaattttaaaactaaactaattatcagataccccaggccaaagagagtgactaaagaaaaaataatcggccaaataatcctaattgtaaaatttatccattgtcctgtaaaaagcataagcgctaaacacacaatgatagactgtccaagtgaaatggtaatatttaccatgcttctattaaagaataatttttcacttgaaattggcatcaaatataattgctgtaaaatcccacttttcgcattattcatagtgttactgcctaacattgatactgtattctgaattgttgtccacaatgtaaagccaataattaaagctgaaagtgattgtccgataatacccttactaattgagttactcccccaaaagatacccataaacattaaaatagttaaagctaaatctgagagagagctaaataaatagcgtcggtatatgattaattcacgctgaaattccgcttttaatgctaccatcttcattctttcctttcatataaaaatcaaccacttcatttaaacctttatttttagtttttagatccatcaatttaaattgagttaaaaatttcaataaatgcgataaattttttcgattagataaaaccaattgataagtagtattattaatcgaaataatcttagcaatactttctaaaactgctcgttgattgtttgaaagagcttgtgaaaattgaactgtgataaatttttcttgattgaatttatctaaacaatcagctttactaccgctataaattaaccgtcctttctttattaggagaatctgatctgcaattctttgagcaaatgccaattcatgcgtagttaataaaattgcaactccttcagaagctaatgtttttaatattcgttccacagtttctaccgcttcaatatctaaaccaagagtcggttcatctaaaaccaaaaatttaggcttagagattaacgcacagcaaatagcaataatctgctgcatccctcgacttaattcaaaaataaccgtatcctttttagacaagagatcaaatttctctaatagttctaagccatttttctgtgctacttttttatttagtccacgttgagctccccaatagataaaattttccattggtgtcaaagcataaaacatattacgtgcactctctaaaactaccccggtttgttttaataaaggtgtaaaatcattttttagcaatttattttcaaaatatatttttccttcatcaggaagcaataagttcaaaattatttttaaactagtcgtttttcccgctccattaaatcctaaaaaagcagttatttttccagcgggaatatcaaatgataaatcttcaattgcccttgttccattttgaaaacttttgcttaagtttcttactttaagtaacattttaagtcctcttaaatttctttcagtttcttattaattcgcttaacctcatgccataaatgataaaaataaattccgtatgctaaagcatacataataataaaatcaacaatcgcttttagtaatgctgatccagaataattaaccttatttaaaaagaagcaaaagcttaaccatgcactaagacaaatgaaaaagttaataaagatttgtttttttaaagaccaattatcatgctcaaaaaccaaactggcaaaataaaagaaaatcccaatcaaaaacgaagaccctaaccagaaaagaaaatattttaccgaaatagttgtctctaatccattcttgaaaaactgattttgtaaaatatcaattcccagccaagtcatcccaattcctattcctactaatccactattaattaaacgtacaatatgtttcataatcccagtctctcctttaatttttttatttttcgacgggcaatttgcacacgtaatccgtttttcatcaaggcatcgatattaccattactgataatttctaaatgatcgataaaacgataatttagaattacacttcgggatgcttcaataaaatcagttggtaagttaatgctggcctgataaagtctacctttaaaaagatatgttttatcctgcgtataaattattgtcttttcattttctacttgaattaaatatatttttgaaacttcaatcgcatatgctgtttcttttcgatatccccataaaatttgaggatcagactgcaattcttgagtgattcttcttatcttgtccgtcatcttctttagccaaaattcagctttttctttttgtaaatctttatcgatattaaactttatttccatatgctcactccttatattgcctataagtatactcattgcattttctaaaaccagtaattttcggtaaacggttaaaaacttagggtgaatggtcatatctcaaataaattcgaagtttttgataatataatgattactaattggactaactgggaatatttagtacctactattcttaaagaatatactgacaacgaatcagcagactttatctatcaacgcactcattcattaaccgaacaaattcttgataacattattaaaatcatcaagtaaacaaaaaagcgagaaaaccttattatcagtcttctcgctttttatattaaaaactattattttaattatttttctcttgagtatgacttaacatctgcgtcaatttcagcaataaagtcatctaaactcttagaaatttgttcttcagtaccataacgacgaacattaacaccattggcattcatttcatcgtcacccaaaactaaagtataaggaactttttgagtttgtgattcacgaatcttgtaaccaagtttttcgtttctgtggtctacttctgctctaaatccgcgcttagctaattcttcacgaaccttatcagcatatgcgccgtgagcttcctcgttaactgggataatttcagcttgaactggagcaagccaagttgggaaggcacccttgtaaatttcagttaagtaagcaatgaatctttccatagtaccaacaataccacggtggatcataactggacggtgttcttcaccatcttgacctacataagttaagccaaatctttctggaagcataaagtcaagttggatagttgacatagtttcatcgttacccaaagcagtcttagtttgaatatcaagcttaggaccatagaatgctgcttcaccttctgcttcaacataatcaaggccaagatcatccatagctgccttaagcattgattgagatttctcccacatttcatcatttgcgtagtacttatcagtgttctttggatcacggtatgaaagtctgaagtagtaatcagtaatatcgaagtctttgtaaacatccatgatcaacttcaaaactttagcaaattcttcacgaatttgatcaagtgcaacaaaagtgtgaccatcattcaaagtcatttcacgtacacgttgtaaacctgataaagcacctgacttttcatatctgtgcatcatacctaattcagcgatacggattggcaattcacggtatgaacgaatgtgatgcttatagatttgaatatgtgaaggacagttcattgggcgaagttcaagcatttcaccatcacccatgtccattggtggaaacatgtcatcacgatagtgtgcccagtgaccagaagtcttgtatgcatctacgttcattaaaactggagtataaacatgttcatagccatcagcaacttctttatcgacaatgtatctctcaacaacgcgacgaatagtagcaccctttggcatccagtacggaagacctgcaccaactttaggatcaacaaagaataagtctaagtctctaccaatagttctatgatctctttccttaatttcagcgcgacgctttaaatcttcatctaaagctgccttcttaaagaatgcagtaccaaaaattctttgaagcattgggttagaagatttacctaaccagtatgcaccagcaactgataaaagcttaaagttcttaatcttaccagtatttggtaataaagcttcaaaaccaaagtcaacaaagtcacctaatttgtaaactgcaacttcgtctttttcgtcctttaaaagatctaatttgaattgatcatctttaaagatatcttccaattcactctttttcattgaagtatattcgatcttttcgccattcttgattgccttttgcatttctttttcaagttctggcaattcagtaattttaatttgatcttccttatcagtatctacaaagaagccgccctcatctgcttcatgcatacccaagcgtaattctggatacttacgcttagcgatagcttcaagcaaaaatgcagcagtagcacgtaaaatatttaaaccttcttcatccttatcagtgatgatagctgcttctacatcttcatcaacaacgtaatctaaaggcttcatttcgccgttaatttttgcaccaacagcagcttttcctagagaagtagcaattgaagatgctagttctttaacagaaactgccttgtcaaaatctttctttgagccgtctggcaaagttacagaaaaactcataaaattttacctccaaataaaaaatcccagcactaaaaatagcgctgggacgttaaaatacgtggttccacccgaaattcgaattaattaccaaaaattaattcctctaaaggtcgttaatggtacctaaccaaattataaaaatttcaggaatgaaattggggttttcttctaatcaggagcttccagaactaggctcctgtctctgagttgaagaaaatcatgtctttcattgactttcattatactagctcatcaaatagatgcaagcaaaatttggaattaatttctacgatttttaccgccaacaaaaacctctttactcaagaaacgaacccgctccattaagcgtcttgccttaacctcatcaacattatttcttgtttcagcaaaatgttcagccaaatcatccattgtcatatttgaactaaaaaatgttggtaaaacattatccatgcgtttttgcaaaataacgcctaacacgtcatcacgtgaccattcacttagagtctctgctccaatatcatcaaaaactaaaacaggagctgacgcaatacgatcaatctcgtcacttaagctattatcttgaaaatggcttcccaagctggcaataaaagaaggtacatgtaaaaagactactcgacttccttgacgcgcaatagcgttagctaacccagctaagatatacgtttttcctacaccaaaatcaccagttaggtacaaacctttgatatgtttgttcttcttaaaactggctaaaaacatagctacttcatttaatgcagcatcccgttcaggagttgaatcaacattttctagttcaacatgacgtagttttcctggtagatcaatcaattcaatcctgcgttctgcccgcattttagcttctgagtttaactttgcctcagttggaacataggtaatatcaattacctttccattaagaaaaagctttggcgtatatccttccatcacagggtttggcgcctcaatttgctcaacatagttaaaaatcgtaggaagagaggcctggacaatttctttatttaatttgtctttattttgtgtgagaaaggcttgaacactgggatgctttattgctgttttagcaatcttttttccatcttcgcttaattttcttttcttgataatacgtgtgattacttcagaaatatcttccaccagtacaacactccctattcatttttaccaaattcacgaaagattcgatttctttcctcagctgacatggttgttttcttagtttgatgctgtttttcatacttcgaccaatcagttgtcttacgaatattctttttgggagtacgataatattgatgattacgtttattctttcgctccttaagatatgcgatagcttcagttggcgtggttattccttgctgaagccaatcattagcaattcgatcagctaaattattagttaatacagcatcatattcaaaacaagtatgaacaatcaaattaattaaaggtggtgttaaccccatttgatcttgcaaacgaaagataactttcttttcatttgcagttacatagccaccttttttctcttttaattcgtataaataatcagttggcaccttactatctactgcacgaattagatctgcatctgcttttgataattttttaattgcatgatcagcatctttaggagtttgacgtaactgctttttaaccatttctttattacggttaagtccaaagttttcattaactgcattttgaattgcatacatattcaatttatctgccccagctgacatcgtaatcagcgcagtttcgacaaattcttgctcagttaaatggtaaaaatcaataatctgtttaatttctacctggtgctttaaaacttcttctttcttaatatgatagctctcaaacaaatcaaccaaaaagctccagtcaacttttactggctcattacctaacttaatttcacctttggcatctttaggaacttcaccagctgcttctttaacttcaactggtgcatcaattgcattttcagcactcaagtgaaaaacatcaaaaaagccacttgtaacttctttagcatcttttaaaccgacaaaagttcgcggagtaaatttttttaccaaacgatcaaaagctacatttcctactcgttcaagcaacaaacttgaaagtaaaaaggtgtgaaagaactcgcctgctgaaggaactttttctacttcaaaaatcaaaacctcgcctaaaacaggatttgaacctaaaaatgtcttaattaagcctgttgcctctaaatgatgcaaagttttaaataagtcctctaattttaagtttgtttgatcttgaagttgatataaagttttataatctttggcaaaaggtacttcatcaaattcttttgtcaatgttatgtataatcctactccacgaatacccacaagaggctcaaaaagagtagttaaaacttttatattttcttcactaacagctacttgattagccacataaaaaggctgcttagggtcagcactttcaaacacaggctacctactccttatcatgtttagccatcatatcttccatggcttccataaatcctgaaacatctttaaattggcgataaatacttgcaaatcgaatgtaagctacatcatctaaattagccaattccttcatcaccaaattaccgatatctttagatgaaatttcattaagaccttgctttctaatttcattttctacatgatctactaaagtatctagttgttcgcttgaaattggtctcttttgcgcagccatcattacgccatgcaaaattttatcgcggttaaaggcctcacgagtcccatcatttttgattaccaatagaggcgatcgctctactctttcaaaagtagtaaagcgaaaaccacaattttcacattctctgcgtcgtctaattgctctattttcatcgcttggacgagaatcaattactcttgaagcattcttatgacagtttggacattccaattttctctacctgcctatcttttgtaataaatcagataatcttttctctaagtcatctattgtaccagtattagctactacataggtagctcttttttctttttcgcttagtggcatttgattatttattctaaccaaagcttcttctttagtgaaattatttcgtttcatcagacgtttaacctgcagttttggtgaaatagaaataaccaaaacgccatcgcataagctttcaaaaccagattcaaatagtaaaggcacatcaactacaactaatttttcttgatttaaacggtatcgctccatttgttgtttaattttctgatgaacaagtggatgagttatctcatttaattttttcagcttagttttatcattaaaaactattccacctaatttatgacgattaattgtttgatcatcattaagaatattgctgccaaaataattaactattgcctgataacccttttggcctacttccattatctgatgagcaatcaaatcggagtcgataatcggaatattttgcttttcaaaaaattcatcagctgtacttttgccactggctattccgccagttaatcctaaaaaatatgtcatttatatagtacctgacaatgcggacagaaagtagttccgcgtccatttactttgatcttctctaaaatagtgccgcaactactgcactcttcaccagcatgtccataaacttgcagcattttttgatagccaccaatctcaccattagcatctaaataagtatgaacagtagttccacgttccttagttgctatagcgatagtatggttaatattttgatataaattcttcaccttatcagcaggaatagctttagcactacttaggggatgaattttactcttccagagcacttcatctacataaatatttcctaaaccacacacaattgtctgatctaataaagtgttcttgatattctttttcttctggctcaaggcagcaacaaaatactttaagttaaattcagcagtattaggttcaggtccaagatggcgaattccagtcgtttttctttcagtccccgtttcaactaaatgcatcctaccgaattttcgcacatcatcataacgtaaggcagttccatcagtaaaaataaattctacatgttcatgctttcccttaggtgtatcaggactaactaaatgatattttccttccatgcgcaaatgcgaaaccattgttaagtcatcattgaatctaaagagtaaatacttgccataacgatcaatttttaagatccttttatttgtcaattttttaacaaattcagctggatcattaactataattttaggataccaaatattaatcttggcaattgtctttccctttactagaggagttaaagtgcgtctaaccgtctcaacttctggcatctctggcattaaatcacctactttttacttagcatcataccaattatggccccagttagagtcagcaattagtggaacatctagttttacagctgactgcataacttctggcacaatctttttaattgtatctaattcatcctttggtacatcaaaaataagttcatcgtgtacttgtagaaccattttagtctttaaatgtaattcatcaagtttcttttgcatattaatcatagcaatcttaataatatcagcagctgaaccttgaataggagaattaattgcagttctttccgcaaagcttctaacattaaagttctttgaatgaatatctggcaagtagcgtcttctatgcataatagtttctgcatagccgttttctcgagctttcttaattgccttatccatataatctttaatttgcggatattgctcaaagtaattatcaataaatgtctttgcttgcttacgactaatgcctaagttcttagacaaaccataatcagaaataccgtaaactattccgaagttgactgccttagcatgccgacgcattaatggcgttacttcatcaggtgaatccaaatggaaaatcttcattgcagtgtgagcgtgaatatcataaccagacttaaatgcttcctgcatatgttcatccccagaaacgtgtgccaaaactcttaattcaacttgtgagtagtcacaagaaaagatatagccgtctttagttgaaggcacgaaagcttttctaatctgttttccctcatcagttctagttggaatattttgtaaattaggatcaaccgatgaaagacgccccgttgcagttaatgtttgtaaataacgggtatggattctgctatcaggctgaatacactcaagtaatcctttaacataagtattttgaattttagcaatttgacgataatccaaaatttctgaaacaatcgggctcttcatcttcaattgctctaatacttcaacagaagttgaatagccagttttggtctttttaattggcggtaagtttaatttttcgaaaagaatatgtcctaactgttttggtgaatttaaattaaattcttcgccggcttgttgataaatcttatgttctaattcttgtaatttaactgcaaaatcattgcctaattgatttaaaaccgatgcttcaaccttaatcccagtaatttccattttagctaagacaaaagcaactggaatttcaattgtttcatacaagtcatcttgctcgtgatcttttaatttctctaaaagtggctgctttaacttctcaattacagcaactttagctgctaaatgttcaaagaactcatcatcttcaggtacagcttgctttttacctttaccataaacttccacgtcagtttttactgaataatcatcatacaaatgcgctacttcgccaagatcattcgaattattttcattattaactaaataagaagccaggagcatgtcataatctagaccttctgcatcaatatctagtcgatgtaaacctacataggttcttttaatgtcgaaaacatttttcttaatcttcttatcttctagcatttgacgaagtggagcttcttgcagtaagactacatctttagaaacatagattttatcactaacctttagtgaaaatccttcaagcggagctagatggtagttatcacccaacattgccagataaaatgtcacttctttttcattaattttatctaagtcagcgatattttctcttgttaattctagatactcgtacttctcactttcttgcttaccggcactcactccacttgcacctaactcagctaagaattttttaaatcctaatctttcatataaattacgtaagtcctcaatattaggctcttctagcttagtatcagcaagtgtcacttctactggagaatcacgatcaattgttgctaactttttagctaaaattgccttatctttatcattaattaggttctcttttaacttggattttttcatttcatccacatgttcataaagtttttcaacagagccatatttttgaattaaacgtgaagctgttttcggaccaactttagttacacctggatagttatctgaattgtctcccatcagcgctttcatatcaataaattcagttggcgttacgccattaacttctttcatatgttctggcgtatatgcttcagtatcaccaactccatttttagttattaaaaccgtggttttatcagaagcaagctgagttaaatcacgatccccagttacaatatcaacagtgtagcctgcttcttcccccattttagaaagtgtgccaataatatcgtctgcttcataattttttagctcatagctctttattcctaaatctttaagcatttcacgaattacaggcaattgttctgataattcacttggagttttttgtcgaccgcctttataatcctgatacatcttagttctaaaagttacttttcctgcatcaaacgcaactaatacattgcttggatcagtctgcttcataatcgcatcaagcatattcttaaaagtaaaaattgcatttgtatgtaacccatctggactagtaaagcgatcaagctgacggtataaagcataaaaggcacgaaaggccacagagttaccgtcaattaaaagtaatttcttttgtgccatctttttctccttaaataaaaaaactgtcaaatagtctcttacctattttaacagtttttcttacatgatttaattatctacatttgttttgaaccttaaatcctaaaatggattattttcatcaacaattctatggtaattatcaggatcagtatcgccttctgtacttaatactacaatgcttgaattttgatcaagacctaattcagtacgttctttacctaaatctggattagataaaatttcataaacataagcaaaaccagcagcacccgattcaccagaaactaccttaggatcaccatcaagtgggtgacctaaacgtgccattccttctgcatcaacgtcttcacttaatgttccataaaacttggcgctatcacgaattattggccacgcagtaatacttggcgtttgacagtttaaaccagccatcattgttttagtcaacccttctaaatggtgacgcttaccatcacccttttgagctgataaatagtagcaagctactgtttcaggctcaacaattgtaattacgggcaattcttcaggtttcattctttcttctaaacctaaaataatcccagctgcaagagaacccacaccagcttgtaaaaagatatgagttggcttttcttttatttgatgtaaaaattcgtcaacaattaaaccatatcccttgataatccagcctgggatcttctcataaccttcccaggcagtatcttgaatcataattccattagggtctttttcacagagttccttaacttctttaacggtattgtcataatttttatcagtaatttcaacttctgtattttgaatcttgcggatgtgatcagcacgaatttcttttgagcctttaggcatcttgattactgcatgagttccaagcttacttgctgcccaagcaattccgcgtccgtgattaccatcagtagcagtatagaaagtaatttcttctgctaactttttaacctcaggtttcattaattcatcataggtaagcttttccacatcaaggccagctttttcagcaatacaacaagccatggcataaagaccgcctgcgcctttaaaagaattaataccaaagcgactactttcatctttaacagcaatttctgcaacatttaattgcttagccaaattagtcaattctttaagttcagttggcttgtaataaggaactgagttaaagaaagtttctacttcatggtcatcttttaactctggagctttaaaggaaaaaggtgactttaataactgaatatttttcataattatacctcataaacgttaactaatgactttaagtccagtttatcattctttatttacgcttaatcatttttattacgtacttgagtatatttcataaaaatagcgatgataattaacacgagaactaataagaaaatataagctaaatgagtaccatgagcagttggaattgcgccttttgatccagcctttctttgcgcaaacgccacaaaagcagcagttgttgatgtaccaaccgcaccagcaaattcttgtaaagtattcaaaattgcattgccttgggttacttcacttttttcaagatgatcaagcgcatcagtcataacgcatcccatcatcattcccattccacccatatagaaaatataaataaatagaataagaagattacttaaattacttgtaaaaatggtaaaaataagcagttctagcaacataaaactagacccaattaaaatcggttttcttgcaccatatcgatcaagcaaacttccaccaaatggagctaaaaatgcaccagcaaaaccagctggtaaaacaactaatccagcaattaaagcagaatctccattaactaattgaatatagtttggtaataaaaaggcattgcctaatgaaataatttggattaagaaaaatcctatagcgtgagcagcaaaaaatttgtttttaaataaatttaagtctaaaactggatcgttaattctatttgaacgatagactaacaaccctaaagaaactaaggcaattaaaatagctcctaaacaattaaaggcaaaataatttccagtgctcaaattgctaaagcccaaaatcattccaataaaaaagattgcgattaatagcatacttaaaagatcaaacttaacttctctcagttgcgatttttgtctaattcctccaattccaagtaccaatgaaatcaagataaagggaatcataatataaaagatccagcgccaacctaagtgagttacaacaagaccaccaaacgttggccctagagctggtgcaataccagtaatcatatttccaatccccatcattactccaactcgactttttggtacctgttccataatgatattaaacattaaaggaagggcgatcccagtccctagcccttcaacaattcgaccaagtaataaaaattcaaaattaggcgcacatgcaccaataattaagccacttaaatataataaattcgctgtgataaataacttttttgttttaaagtgagccttcaaatttgctgataaagatacaataatcgaaatagttaacaaataaattgatgtcagccattgaactgtattagtagctaaattaaactctttcattaaagttggaaaggcaatattcattgaagtctcaataattaccccactaaatgagagaatgcctgtcgcaaaaattgctgcaagtacgtgcttaggaattttttccttagtcatttgcttttccttccttaatattctttagaaaagccgtaataatatttacatctttcattgataaattacctaaaacttcttcattatcttgtttcatatactgcctaattttaggcactatccttaaggcagattcagttaattgtgcctgcttttttcttttgtctttaggatcattaactctaataattaatccatgtttctccatccgttgcagcatgattgtagttgttgatcgcttaatattaaattcatgctcgatttcattttgcgaagcaagactgttttcatgattagataaaaaatcgatcactgacatttgcacgcctgtcacgcctaaactattagcaaaaatttcacgttcacgatcaatttgagtagctgcttgtttaatcaactttttcagtgtctccattttatctcccccccttctatttttgttagctgtctaactaatatattataaagcaaaattgttagacatcaaacgtttttcaagaataaaaaaagaatcacattgtccgctatcaatgtgattcttttatataagtatctaagtaaaaattttatgtgggggaaaaggtttttatttagattctaattttttcgtgaaaaaagttactttttgttgataatcatctatcaataagtttaaattctgtcgacccttccattgtccatagccaaagatcgacatacccaaggctcctaaaataaagaattattgatcaaacctatccccttaataatttattgcctacggaactagagctagcacaagagtttaatacaagtcgtccaacaattaatcatgctatccataatctcgtccaagaaggtttactagaacagcgcaagagattaggtcccttgttaagagaaataaaattcaacaagaatttactcaccttatacaaagctacaatcaagaaatgagtaccaaaggactaaaaacaaaaacaaaagtactctattttcaaagagtcgttcctaattcagaggtgcaaacagaatttaacctatctacatctgattccgtatttaaattaattagattacgatacgttgataatcacccaattgttaaagtaactacttatgtccccgtttcacttgttcctgatttagaaaaaatcaatttttcaactgcatctttatatcttgaacttaagaaaagaaatttagctgttacccatgttgtaagaaaactagaagttaaaaaagcctcttctgaaattgctcaaaaattagccgttaaagaaaatgatcctgtattttattttcgcacttgcggatacacagataaggatcaaaaaatagaatattcaattgctacttaccgcggtgatatgaactcttttatcattgatctcaaacgttaaatagcaaaagggattgatatcttgttacgacaagaataatcaatcccttttttcgaccttaaagtttttaattaaagtaatttttcatatgcgtcttcatacttaggaatatcaccagcacccataaatacgacaactgcatttttatgcttagttaaatcagcaatattatctaaatcaatcacttctgaaccaggaatattattaactaagtcctcacttgaaatatcaccgcttgcttcacgagcagaagcataaattggagtgacataagctttatctacatcacgtaagatctcttcaaaatctttttgatatttcttagttcttgagaaagtatgtggttggaagactacgactaattctttatctgggaacttttgacgagcagcttgaatagttgcacgcatttctgttggatggtgagcataatcatcaattactgaaacatccccaaagtctttttcagcaaatcttctcttagcacccttgaaagtaagtaaaccttccttaatgtcttccattggaactttttcagtataggcaactgcaattacagcagtagtattcaaaatactgtggtcaccaaacaagtgaatttcaaaacgtcctaaatccttaccatgagctaaaacattgaatttagaaccagtagtagtcttttcaatatttactgcttgaaagtcatcagtatctttaaaaccataagtatacttaggaatatcagtctttaagctttgaagacgcttgtcatctccccatacaaagagagccttcttagtttgatcagcagcagtttgaaaagcactagtatagtcgtcttgatccttaaagtaatctgggtgatcaaaatctatgttagtcataatttggtaatctgggtgatatgccaagaaatggcgccggtattcatctgcttcataaacaaagaagcgggaatcagcaacacccttgcctcggccatctccaattaagtatgaagtaggcgctacttcacctaatacgtgagctaaaagactagtagttgaggtctttccgtgagtaccagataccccaattgaagtatgcatttgtacaatctcttcaacagtatcagggtagctttgccattcaacatttttatctaagcaagctgctacttctgggttatcttgtttaaatgcatttcccttaacaattacttgttcatcattgcttttaatatttgctggatcaaaatcttttacttcaataccagctttttcaagtggaacttgtgtgaaagtatacttttcaatatctgaaccagcaacattatagcctaaatcatgtaaaactaaagctaatgaagccatgccagttcctttaataccaatgaaccaaatttgtttgtttttatctaacatattattaatatctccattgtttatgccaaaatattcgctttaattctaccatttttaacacaaaaaaagaacataacacagcgttatgttctaattcagaaagtagtaaactcatccatgcttcctactctctttatttttttaatttcaaccaaattaattgtattggaccctaaaaatattaagtaactttgatcatcaattcgcgccaaaaccgtttcttacattctcactataacactttttctaattaaataacatgataaaaatgtcgaatacatatgaattttgattcatatattcatagttctactattgcgcaagactattaacaaataaaagctgacatgtaattcatcagaagaagtttaaaattacactagcctaaattttacctaatattttagtaccatgagcttgagtgaccccgattgtttctataacagaatttacattctcatctgttataccaccaccaggtaagatctcaattttatccttagcttgtttatttaattcttttaaattctcaaaacaatcagtaattggacgatctaatgatccaccatgagtaagaatacgcacaactttgtttttagatagccattctaaggcctctttctgctttgaagctattaattcatcaaaagccatatgcattacaacttctatatttccagcatgggcagttgcgataagctgcttcattgcggttttatctagctgtttattattagtcaaacaaccaaatgctataccgtctgcattgagtaaactacacatttgaatatcattattcattatttctaattcatcagcagtgtaaacaaaatttccactacgtggtctaatcattacgattactggcaccttatacctatgggcaaactccaccgtctttttaatcacaccaaatgatggcgttgttcccccagcagctaaatcattatttaattctattcgattagcaccacgcttgatcatcaaaggcacattagtaaaattttccacacatacttccttgatcatttgttatacctcgctaaagtcaatatctagatctttctcagcagcagctttttcttctttaagatattgcttatctagcattttcacaaatggatagtaaattaaaatatttaaaataatctccacaatttgtaatgcagatcctgtccaacttcctgttgctaaccacccagaaataattggtggagtagtccaaggtaattgaacaccatttgtccaagctacccatcccaagttcattataattcccgaaattaatgtatttaaaactgggcataaaataaatggaataactataacagggtttaagactaccggtaaaccaaaaataacaggttcattaataccaaaaattccaggcaaaattgccaatttacctaactcaagcaatctttttgatttacaaattgcaaatacaacaattaataaagcaagtgtactaccaccaacgccatatgttgtaaataaatcaatgaaaggttgagtatagatatgtggcaatggagcatggttctgaaatgcctttaagttgtcttgcgttgaaacaaagaatataggttgccatactgaatttgtaattgaaggtccattaataccaaagaaccaaaagaaacttgctaagaagttgtatagcaaaactgatggtaaagaaatacccacatgtttcaatggtgtctgtaaaatcgtgtaaataaagttatacgctgtatgaaaactagttaaagagaatagaattcttattagaaagaagaaaacaacgactaatgcacttggaatcaaagcatcaaatgatttagtaactgccggcggaacaccatctggcatcttaatagtccaattacgctttatcgcaaatctataaatttcgacagatattaaggcaataataattcctaaaaaaataccattaggccctaagaactgagtttcaactgcagaaacagttttcttccccaagacaatagaagtaggagtcaaaattaaaaatgatataaatgaaaccatccctgattgaatgggatctagtcctctattcttaccatatgcatatgcaatcgcaattgctgataatattcccgtaaagctaaagacagaattagatacagcactaaaccaatcaggaaattgcggtccacatactttaatccaaaattcagaccagcctggaattggaaaattaccaataagtaaaaatatagaagtaactatgatcagaggtgtaataattaaaaagccatcacgcaatgacattaaaacaacattattccctagcttcgaggcaactggcatcagcaccttctcaaatttcttttgcattttaaaacctccaactgaaaaaaactaatagcagtaacttcccttaaattttgcaatatctcctttatttgttaaaatttgacaccccttagccaaattatctaaggattcagcaagaccggtaccaccttttttaggcatcttaacaattggaaatttgtctttatatttttcaataagttcttgattcttttcttttgctatagctccgattacaggaatgctagtgttttctgtaattgcaattccaatttctaccgccatttcggcgaaatcatgataatcaaatgttggcccaacgataactacatcagcctccattttttcagccatttttgaaaattttctctgtacgatttctttattttgttgataatatttcggtccacagtaaaatgtaccaatgatctctccgtttacagcctctaaagccttctcgacattatcagcacttcccattgcaatctttttaccgcctaacggtgtgtcgcttctctcatccccacctaaaccagcttgaatctggtcaagaataataatggttttcataatatgtcaccttcctacactataggtgcgtgaatccttttttcgtacgcatcaagccattcttggctaacaggctcaattttagtcttcatattatctattgggttagccatcaaaatcacaggtttttgcttatcagttgcaacacaaaatgtaaactcaacgttagtagctactccccattctcctttattattcattgcaactaatgaaaactctccagctttgccatagcgcttttttaaatcttttataaatggataaactgcatgattgcaagcatcttgtggcaattcaccttcctgcattttcctaacaatttcatatgataagcagcctttcataatgtcttctccaagacctgttgccgcagcaccaccaactttactatcaacataaaagcctgaaccagataatggcgaatcgcctacacgaccatcttttttcataaataaccccgatgttgaagttgcagctgccattgagttatttttatctaaagtaatagcacctacagtgtcatgcccatcatatgggttcaaattctgctgttcaatttctttacaacgcttttgccagctttttttagcacgttctgttaacatatttgtcatttcaaaaccatgtaaactagcaaacttggttgctccttcgccaactctaaagctattataatgttcacgactcaaggcccgcgcaacagatacagcatgcattacattttcaatcgccccaacagctccttgagctagcgtatctccattcatgaaagctgcatccatttgtacaacgccttcttcgtttggaagacctccatagccaactgacttataatacggatatgcttcaactgtattaattaatttttcaactgcatctcccgcagtaccattttctttcaaaattgtactagccttttcgactccttcatttgccattcgccaagttgcaattgttccccatgacatagaaaaaacttcctctctattctaaagaacctaatctttccaagcttctcatatatattttgatacttaataaaaggtcttttaaattcatccattcattttctttgtgagctattcctttttgtcctggaaaagatggtccaaaggcaatgatatttggcattactcgagcataagtggctccggttgttgtaactggcgtcccatcaagtccagtcacttcttcatatacttcagataaaatttgtataaatttagaatttttattatgcattacactaggaatactacgtataactttaatattactgtttactgggatattatttttgattccttctgtaatttgctcctcttgatatgacactggataacgaatagctatttctatttgcataccattattttcaatacttaaaccggtaggagtcataattaattttccagaatcattatcatgaaactcaattcctagtccttctccataatgctttcgatggagagctttaacaatccattcaaaataactatttaattgccctgaaactaacttttcatcaactattttcttagctaagtatgttatggtattctttcccatttctggagcattacttggaactcttataccatgactctcaattcttttatttttaatttctacacttaattcatcaggcacatgatcttttgccatgtccccttgcagattcttcacttgattcagacttccatctaagattggtgtaaaaatagaataatttacgattccgcgttccccatatactactggatatttacaatcagctgtccaaccaaagattggtggtttttccttctttaaatataaaggcacatcattagagccactttcttcatctgatccaaaaactaatctaatcgtctttttaggcttataaccaagatccttaagcattttcattgcccataatgttgctagtgcaggacctttattatctagtattcctctaccatacaatcgaccattctcaacggataaatcccacggattaaacttccacttatcacctactggcactacatctaaatgatcaataataccaatataattctcatcgtcatctccccattgcgcatataccatcgcattattaacaatttttgctttaaatccacatttttcaataattggaactatagtttctaatacttttttaggtcctttaccaaatggagcgtctttttctgaactgcctttaacgcttggaatttgcataattgtgcgtaaattttctaaaaatactttttcatttgtacttatagctttgttaattttctcttctgatatcattgtcttaatccttaaaactaaactatctcaacctagttagtgttgacttgaatgaatatttatcagctcgataaaatgatgtatcaaagaaaatagggattgcatctggcgtataggttatagtcttaactttaaatattggctgttgtcccttaatgttcaaatatttagaaatttcatcagtaaccataattgcttcaatctcttgatgtgcataaccaatttcgatattttcatttaagattttaaataaagattgttcaaaatcagttagtgtcttgttttttacatattcaccacaaataagaattttttcgagagtcatcgggtcattatcccaataacgtattctttttaactcaaaaacctttttatctaatctatcgtctagtgccaatatttcactaatttttctactcggatttctaataggtgcgaattttaatactttagtgtgcaccgtttttccatgttctttagcaacttcagtaaaactttgcaatcctcctctaccagattcaatttttgaatttctttcagcacctaacattacatatgtgcctttacccggatcttttactaatattttggcgtttatcaaacgactaattgcttttctaatcgtcaaacgtgaaacatcaaattcttgcgctaattgatattcagaaggcagtcgctgacggctggtatatgtttcatttctaattctttctctgattatctttactatctcttcaacttttgtcatcattttcaccagcttccacttaattcaagcgtcttttcatagtatatactatgctgtatgctcctaaatgtaaacgctttagtaaaaaatcccactaaaaatattaattaattcttagtgagatcaaaaaaagagcccattaccatcaatgagctcccttatataaatatattaaaatgtattacaaactaatttggccactagttaatagttcatcgcacttagttggctcaaactcgtctccagcattaaagtcatcaggaacaaccataataccacgcttttgaggagcatgagctaatcctaattcacgtgccgaacaaatcataccgtatgaatcaacaccgcgaagttcgcctggccaaatttgttgaccatttggcatcaaagtaccaggaagtgcaacgactaccttttgaccttgagcaatatttggtgcaccacaaacaatttggtgttcttcaccatttccaacatcaacagtagttacatgcaagtgatcagaatctggatgtggttcacaagtcttaacatagccataaacaagtgttggtttaccaatttctaatttagtatcaaaaccagcttcagctaattttttattcaaagcatcaactaaatcttgtgttggtttaacttcaccgtttggtaacttatcgtaatctaaaaagctacttacgttaaagaaattaaatccaataacttcaccgtcttcattttcaactcgcgtaacttgatccttttctgtgaacttactacgacccttatcttggtcaagaatcacaattaaagtatcagggtaacttgttttattggtagaaacaatcatttctagtaaatttcctttcctaggctatttgagagagttaaggaagttttctacttcttctttagtctttctgtccttatttactagtctaccaatttctttgccatcttggtagacaacaaagctaggaattccaaagatatttaattcttttgctacatcaattgaaccatcacgatcaatcttatagaattttgcatcagaattatctttttcaatttgtggtaaaaatggatctaaaaagcggcaatctgggcaccatgttgctgaaaataataggactaccttcccatttgcagtaatttcttttaacttttcaggagttaattctttaatttcttccatccgtctcactctttcttactttttataagttatatttattttacaaccttttattttaaaaatctagtctaagatcttttagctaatttcagaaataaacaacaataaaagatatgaaagaagggagtacatatgattgatatgaataaagaactggaaactgtcaaattttttgtgtaaatagatctttctcgtaaattgtttttttaacgttttatttattcaaaataggattctaaggtatcctggacttgaccaaagcctttgtgaattcggttgaagtagcggtcattgtagctcattgcttggatgccaataaaagtatcaagcgactgttcagtcgggaactccgctttaggcttagccttgcgcttaatgacgttattaaaggattcgatcatgttggtagagtaaattgaagccctgatctgcttaggataattataaaaaacaagcaggtctggctcgatgtctttcaggtttctaatgacacgattgtagctcttgttccatttggcataaaaagcatgcaatacatcaacagcagccgctttattggcttgctggtgaatctgcttgaattcgttcatgattgcctcgcgatcgtccacgcgtactttagcgcagatgttgcgcataacatggaccaagcagcgttggaaatgagcttgaggataggtctttgccagtgctgctttcatgccgacaacgccatctgaaaggaaaagctctacttgctttaaaccacgagatttcatgttctggagcaacgccgtccagacttcaatattctcactaggcgcaatgcagtagtcgataacttccttgtgaccattaggcttgatgccaatggcaatatatactgcttctcgttcaaaagtttctcgacgcaacggtatatacgttgtatcaagataaacacaaaagaacttatcgctcagcttacgcttgtgataagcctcaactttaggaatcatttgcttagagatattagacacttgagctggactataatgactgccatacattttttcgatcaaattagctatttctctagtggttacacctttagaataaagctttataaccatatcttctaagagatcagtatgttgtttatagtctggcagagtgtgttgatgaaacataccattgcgatctcgtggcacttgtacctcaattgatccaaactgggtatcaattttacggaaatacgcaccatttctagaattaccagtattccagccatttctagcatagggatcatatcctaaaaaggcagtcagttcagattctaacatgtcattaacagcttgttggatttcatgacgaagcaaatcattaattttatcttgattgaatagagcttgagttatatttttggtaaaatcattcatgaaggagttcttctttctgtatgttttttgttcaaaccaatcatacgagaaaggaactcctttttctaatgttttaggaaattaaattaaggaataattcatccttacacaaactattttacggtctcaagaactgctgccagctggttatagtttacatttttcctactcagaataatttaaatttgtaccattactttcaatcacttgtttgtaataatcaaaactatctttcttataacgtttataactgccttttccattgcctgaacatgctccttcaaatattgcattctatgaagaaaatatcatcaaagaaaaagaaccaagcaactattttctaattgcttgattcttattcaaaactattcatcaacaggatttgacaaacagttattatttatagagagcgattattttttctaattctttgtcagaaatcagtttcaaatttctaacaaattccgttgcttgttccaaagtactaccattattcagttgattttcgagaataattttagcagaatccacttttccctcttttcttccttctgctctaccttgttttataccgcgttgcattccttgctcatatccagcttttcctgcagcttgttcacgttctagtattctcgtttcgtaaagcatgatcttttccctcgtttctggatcttcattaatttccttaattcttctttgcgcgtaatcgaaatgtttatttaatttaactggttcattattcattagtttagccaaggcttttaaatcttcgctttgtccctcagctgaaacttgtgaattaataataatctttgtcacgccatcctgcaattgtttttacctatcttgatcggaataagtatgatacgactcataaaatttatcatctttcttaggcttaaaattacaaagaaaaataatataggcgtcctttaagtttcgataggtatttcctttatttaaagtataacgtaaatcaagtcttgaaaggtagtaacgcatgcgtctaccaatatcatcctgatccgttgtttgcatctcgatattaaacacgcgtccttcatggtctgtgactaaaacatcaagcctaacttctttagcttcgttcttgcgcttaagattattaatttcaacttgcttatctagccagtcgatctttttaattttcagatctggaataatgatttcaagcaaatacttgcagaattctttattttccatcaccattccaaagaccttatcttctgtgaacccaaaccagggttcaatcttttttgccatatgagtaaatcctctcttaaagatatttgaggagtcatcccatatgtttattacgcaaagtgatgctatttttcctaaggaaataaaaaaatactccccaaaacgggaagcatctcggctctattcaaaatgtgcatgtaggcagtaaatcggattaccttttgccgcaaatttatgttcatattcagtctcaacatttctttcgaaaatttcattttctgcatgatgtaaatctaaactaacatagtcaaatctcatcccataattgttaagacttaccaaactatactcaaatagcccttgattatctgtcttaaattctaaatgcccttctggctttaatatctggcgatacttgtctaaaaaactcttatatgtcaatctccgtttctcatgacgcgtctttggccatggatcagaaaagttcaagtaaacaacatctacactattttcaggtaaatacattgctatattagccgcatcagcacacattaactgtaaattatcgatcttttcttctaacttagttctcaaaatcatccctgcagctgtggtttgaagctctacgccaataaaattcatttcaggatgtttcttagctaaagtagtgataaattgtcccttgcctgagccaatttcaattgccaaaggcttagaaaagtcattaaatctatcttcccagttaattttcttttccggatctggctcattcaaaatagcttctggatgttcaactactaatttttgagcccaaggcttatttcttaatctcatcttttcacaacctaatatctaacttttttaaataactgttcaattttacttggtaaatagaaatatagcaataaaaatgttaaagcaagcaaaccaataatgccaccaactgcttctaatttttgtggagaaaaaataattagcgccaaactgattaatccccattcaagcagcatccctttttgcaaaacttttcttagtgcttctcctcttgaggttagcgggattggcattacatgatacatcatattatgctcataaactgttcctagagggatcaattgataaagcgttaagaaaataatcaaagcaccactagcaattgcccagcgtgcatcttgcaagcaagcaattaataaaattgaaaaaagcaccattctaatcaataaattgctatattctggatctcttaataatactctttgataaataaaagtatttggcgtttgatcgacagttttaattaaaaagtctaaatactttcttctagcaattcgaactttcttatctggtacatcggtaaacatactataaaagttatttaagagatcaactcttctttcttcatagtctaaggctttgtaccagtcaaacattttaccacgtggcaaataatctactccaacccagccagcaattgctacattagcatagataattggatttggataatactccaaaaaagatagatagagtattaaaaagttaattcctaaaaataaccaaatattatagtaatcatgcttattaaaataaaaacttctgacaatcaacttaaactgtaaatttttacttgcaattaacccaattattataaagactaggtcgccgattgaaaaattagctctcattgtcgcaaacggcaataaaatacccgatactaaaataatcaagaccgttggcaaaatcatattatgcatatatagtggcttgaaatacttcttcatttcactatcttgattaaaaaggaaatgctcatcagctctatcaaacaaagtcgcaaaatgcccaattcctaaagttgtagtccaaatcaaagctaacaatggtttataaaaccaaagattattcggccacttcttaatattttgtgcataccaaaacattaaagctccaaataggaaaattaaagccaaaataaaaaagtcattaaaaaccaaagttagatagtgcatctgctttttaaagtttttattgagtctattttttattaaatcagtcatgcttcttcaccgttttctgatttaaaatttgatataaacgatcaaatgaatcgctaggctttaagccataaaactgtctaatttcagttaaactacctgcagtttcaattgtgccattattgagcaccgcaaatgtttgtacagcttcttgagcttcagctagaacgtgcgtagtcattaaaaccattttttgatcagcaacagcttttttaacgagatcaataaagttagctacagctaagggatcaagtccggtaaatggttcgtcaattactaaaagatcagcattggctaaaaagctagtcacaatcattactttttgcttcatccctttggaaaacttaattggcaaccaatcaagtttattttccagacgaaacatcttacacaattcttttgctctcacccatgcttgatcatgatctaaaccataagtaagcatcactaactcaagatgttcctttaaagttagctctggatataaaattggcgtttctggaatataagcaaccatctttttaaattcagcaggattttcagttaagctaatcccatttaaagtaatcttgcctttttgcattcttagtaatccaagcaggtgcttaattgtcgttgatttaccagcaccatttagtccaattaatccaacagcttggccaggttcaatcgttaaatttacatttttaatgacattaatcccagagtagcctccggttaaattttcaattttaagtgccattactttttcctctctactgcaataagatacatatttatgatagcatgaacataagttaaactaaattttcttttcattaagaaaggggtcttattcatgactgaattagaaaaggattgtttattttgtaaaattattagaggagaaattccttcctacacagtttttgaaaatgatgacgtcaaggcttttcttgatatttctcaagtaactaagggacatactctaattattcctaaaaagcacctgattaatttctttgactacagccaagaagacgctgctcgctttttacagtatattccagttgttgcccaagcaattaaaaagtctgatccaactattaagggattaaatgttgaagtaaacaacggtgaaattgcaggacaagttgttatgcactcacacattcacttaattccacgtagaagtgaaaatgatccaatctctactcctcatgtaaataatgcagatcaatattcagaagcagattatcaagctgttgcaaacgctatcaaaaacaatctataatatcagtaatttatcctttaatgcggtacaataaagatggttattaagttaaaaattattgaatagataaagaggtatacattatgtctggatttttattaggaattcttactggtacagttgcaggtggcttattatcatacgccaagaatccattaagtggcaattctattagaagcgacgttaaagattctgcagataacttcaatgattcagttcaccgcgttaaaacaatttacgatgaattagaagaaaagagaatggaacaaccagaagaagacaaatctgaagatactgatactactgaaactccatttgaagatgaagaagtcgaagtttcagatcgtccttcacttaaagataaggctcatgatttagttgatgccttctctgcagcatcattcaaggctgtcgaccatgatcgcgtttttgccgcagttaagaataaattaaatgaagcaaaagaagatcttgaagacgcaagcgatgatgttgaaaatgctactcaagatgaggaaaaagtagacagcaattctggcgcaagcgaagaagaacataaggaagaaaattaatgaaattttttggaattggcttaggattaggtagtttagcaggattaggaatttctcttcttcctaatccacaaactggtcgtaaagttaaagatgatgtccgtctctttttaaatgatactaaaaaggacgctacttcattagctactagtacaaagcacgctaaaaatgctgctagccagttaataaatgacttgccacaagctgaaaaatcagttaaagacattcaagacagcttaactaattttcaaagttcaattaaaccagaagtagatcaaatgaaagaaaatgtttctacactaactaaagaagcagaatctacaattaatggaattaaaaatgaactttaatcttaagatttgttagtcttttttataaatatcaagaaaactcttattgtccattgggataataagagtttttatgttatatttgaacttgtaattaagcaaaggatgtgcaaattaatttatgaaaaaaacatggaaaaaagcagctactgttttagcttttgcaggaattgccttaagtgctactgcttgttctggcggtaaggctgtcgttacttataagggcggtaagattactgagtcacaatactacaacaagatgaaggaatctcaagcaggtcaatccactcttgccagcatgattgtttctgatgctctagaaagtcaatacggtaaagaagttactcaaaagcaagttgataaagaatacaacaagtacaagaaacaatacggtagtcaattcgattcagttcttgaacaaaatggaatgactgcttcaacttttaaggataacttgaagactaatcttttgactgaagctgctttgaagcacatcaagaagattaccccagctcaagaaaagaaagcttggaagaattatcaaccagaagttactgtgcaacacattctcgtttccaagaagagtactgctgaagatatcattaaacaattaaaagatggtggcgacttcaagaagttagctaagaagtactctactgatactgcaactaagaatgatgctggtaagctacctgcattcgattcaactgattctactttagattctagcttcaagaccgctgcatttaagcttaagactggtgaaatcactaccactccagttaagactcaatacggctatcatgtaattaagatgattaagcaccctgctaaaggtactcttaaagaacacaagaaacaaattgataaccaaatttatcaatcaatgtctgaagatcaaagcgttatgagaagcgtaattgctactgttcttaagcgtgctgatgtttctattaaggataaagatttgaagaacgttctttctcaatacgtttcatcagatagtctttcaaaataaaacttttatacactaaaaaataccgagatcgtaaaaatcgatctcggtatttttttattctagttttggtgcttgatctaaagcttcgtcatttttaggacgataaaatctgcgattatcttgcgacttaattgtttcagtaaattcacctggcttagtttgctgcagagcattagtaattgcataaactgttgcatccaaatcatcgatcttatgcaaaacttcagcttctaaaactactggtctatgagctgctccgtattccggcaatccatgatgagataaaactaaatgtctcaaaagcattaagtcttcactatgttcatcaatctttagttcatgtgctgctaacataatttgttcatcaattaaaactaagtgaccaattagatttccttcagtagtatatttagtagcaacaggaccagataattcaattacctttcccatatcatgcaaaatacatccagcataaaggagcgagcgattaatctgtggataagtattagcaatcccttcagcatcccttaacatggaaacagtatgaaatgctaaaccatttctgacagcatgatggttagacttaccggctggatatgaaaagaactgcttattccactttttaagcaaataccgtacaattcgattccaagttggattcaaaatttcaaaaacacgtttattaatttcttcttcgagatctttttgcttaattggagcagagtgaacaaattggtttaagtcataaccttcatttggtcctactactcttaagtcataaatccttatctgtggtcgatcttgatactcttctcgttttccgcttaattcaacaatagtgcctggactgaaggtatcagcatcttgctgactagcattccaaagatttcccctaattgtgccacttgaatcgctaaattgtaaaactaagtattgtttaccatttttactggtgcgaagacttgaatcttttaacagtaaaaccaaatccatatcttcgccatcattataatcaagcaacctttttatcatgattattccttttctatccttattggcttcatcgcaagattagttactaaatcttgacgtgccgtaaaaattaaaacttgcgtcttcttagccaattcttttaataattcaacaatataattcgttctttgcgcatcaaagtttacaaaggcatcatcaattaaaattggcaacgcgatcttatcagcaacttgttcaacgaaggctaatttcaaagcaaagtataattgctcactagttccgcgagacagatattcaacttcaaattttttaccatctgcgcgcttaactttaagttttttatctaattcaatatccacatatctgccaccagttaataacttaaagtactttttagcatcttcaagcatcttaggaaaacgctcatttgaagctaaatctaacccccgtgcaatccagttgctagtcaatagatttgccagatactctttaacattttcatttaatgatgattcaagatcagctaacttttgcttttctgcaaaatacttatctgaatttgctaaaacattcatctgattttcaagtttagcattttctgcatgtaaattattaatttgatcttgcttataagcaatttgctcttctaattgagctttattttctttcaatgctgctgggtcttgagcaatcttttctaattgagctagatcagcttgtaggtcatttttcaatgcttcaattttcatcttcaactgttcttgctcttctgcttctttcttcaaatctgtgaattcggcaaagttagcaaccttattcgctgcaaacagcttagaaagttcaatcttgtttttagccagttgattctttttatcttgtacttgaattattaaatcatttaagtgctgcttagccaaattactttgatcaagtaatttttgcagtgaatttaattgactcacaatatcagaaaaagtctgaattttttcctgagtaagcggagataaattctgaacaaaagcttgaaccttttcattcaaagacttttgttcttgatctaattgaatcagtaattgcttcttagactcaatttgaactacttcattccataagctatttaaatcaactgtatttggatcaaggccatacttttcaataaattcttgctcttgctgaccatctttggcattcttttgtcttgtccaaacaaataaacccaggccacccaaagcaatcattactcctagaaagcgaacaaataagttactgattgcaactgcgctaaaaattcccgcaactaacaagattaatgaaacaattcctggtaaattattagcttcctgtttttgacctcttaaagcttgataatcagactttatttgccctcttgcttcactagacaacttacttaatttaacagcttctggttgaaattgatcataagactgtagatccttcttagtcgtttcaatttgcctttgcaaatctttactttcgctctcccaatgaaggacttcagccttatgatcaaccaaagcttgaatcttatccttatcggctagttcgctacttgcttcaatttcttggagttgtatattcaaattatcaacatcattagttaagtccgcaagtttactccgaatagcctgagctctttcgtaattttctttagaaaaagagagaggttttaatttgcgttttagttcttgatactgtttaaaattagttaatttttgcatcaaaagactaattttttgctcttgctcatttagcttaactaactcagtctgaacctgtttcaaattttctttttctgcagttaatttttcttcaaattcacgataatccttaaattcactatctgtttgagccaaaacttccttttgctcttgaatttgattgattaactggttaattacaggtttacggccactctttttaaagagcttctgtgcattatttgaaaattcatcccttaaatcaagcaacttatgactttgcgaagctcctaaaaaataaatctgttccatcaactctgcttgagatagaccagttacctcacgcatcatatcttgattgaaaataaaactatcggtgtagaaactgccgtcaatgttttgaattcgatcaaaaaatacactttctggtactacttcatcatttaagctgacagtcaagacgccctttttaggatctcctttagcatataggcgacttaaaacaaaaacatcatttttatcttcaaaggtcaaactaccgcccatcggactcacatgatctagaggttgataattctcaaagaaaggtgatttattagttctcaagtgaaagccaaataaaacctgcttaacaaaagcaactgttgtactttttcctgcttcatttgcacctaaaaagattgttaaatctttgttcaaattaaaagttacatcatttaattttccaaagtgaataattttaatttgggttagtttcatcatccatatcctttaacttttgtcccaatttaacttgtgctaattcttttacttcttcaataaattctggctgtttcaaaagatcagcaacataatcgctctttttgcttaaatcattagctaaagaataaatcttatctagttcaaacgtttcattctccgcttgatcaaaagcttctttatcagctgtcttaagttgaagtttttcattattggtcaaataaactttcacaggtcgcgaatcaaaccttaaagaattagcaagctgaagccaataatcactatcattaaccaattctagctcttgttcacttaagtattgggcaccttgaattgttaaaccaaataaagtctgttgcttattctttttagttaaaacttcaactatttgttttgttaaaactgtttgagaaattacttgatctaaattcaaagtcgccatttgccagataattggagctgtttcaacaaaattaaggcttatttctttggttgattcatctactgtaccgacataaacgccctttgctccctgctcattaatgtgtctgccttgtaaattaccactataaacaattggtggcttatcactcaaagtttggcgcaaatgaatatgccccaaggcaaagtaattataatttaggtctttaatttctgctgtggtaaatggagcgtagacattttgataagctgcagtagtcttagctccagcgtgcattaaaccaaaagtgaaattatcccctttgttgggaaactcactaatcttatcaacttcaatatgattatgttgataagaaaagccggcgactgtataaggaaagtcagacttagtcttaaactctacagtttctacctgttcatcaggacctaaaagtttaaaatatggcgtttgcggtaaaatcatttcatctggatttaaataatcgtgatttcctaaaatcatcacaacttgtatttcttgatcagtaagtcttttaacctcacgactaaagaacagctgactttgtggactcggatgaaccgaatcaaaagtatcacctgcaattaaaactaaatctaccttttgatctagtgcggtatctatcgctttaataaacgacttttgggttgactgtttaatattattaaactcattagatggcaaaaaagatagtccttgaaaaggactatctaaatgcgcatcggccaaatgcataaatttcatattaattattttgcctttaaatcatcatataaatcgccaatcggcttagtcatagcttgttgaacatcattaatcatttggaagagagcttgttccttagtgatcatgtcctttaattcgtcgttattacgaacttcttcgttaatcttttggtattctttcttaacatcgtcagaaagtggttgacctgaattttgagcagccaagatttgttgttgaagcttatccattctttggtacaagtctaaactttctggcttgttctttaagttttcaagagatttctttaaatccttaaattgttcagtttcttgtaagtcctttgccatttggttggcattatcataaatattaaccatttttataattaaatctcctttatttttactgacctaaaagtcctttaaggttattataccattcgttaaacttagacccagtatcattgattcctttttgtacttgttttccaatattaccgagccagtctgaatttgcacctgtatcttgagaaatttgctgagcgctcttttccttaaattgcgtttgcgaagtatatggcagcaagcgttctaactcagacttataaaggtgcgtaattcctgtttcagaaattccttccatgtagtgattttgatccgtcttatcaaaaccaacccaagttgacaaaacaacatctggagtataaccaacaatccattgatctttcgtaccaaagccataactatctggcacctctgttgatccagttttaccagctactctaaagtttgccggctgagctgatctaccagtaccagaagtgaaaacgcctaaaagcatagaggtcatttcttttgcagtattagtagaaattattcggtgactgccaggattcttgttttgagcaattacattcccgctagcatcagtaattttagtaatacagtaagactgatttggcaagtttccttcattagcaaaagcgctgtaagctctcgccatctgcattggagaaacaccagtcgacaaaccacctaaagctaaagccaagttttggtcactcttattaacatgaatgccgaagttttcaacagattgaacacccttgctgacaccaattttgtctaataaccaaacagctggaacatttttactttgtgctagagcctcatacattggaatcttatttgagtattgattatcaacattttttggttcataaccatttttgccaaatttttgtaatttattagaaagttcagaatcgtagtgatagccactttgcagagctggcgaataaacagccagtggcttcatcgttgaaccaggctgacgcttcatctgcgtggcacgattatagcctcgaaagacatgttgccctcttccgccaactattgctcgaacagctcccgtcttaggatccattgcgacgcttgcaccttgaactttggttccatcactagcatttgacgggaaattccagctttcttcaaaactgtcttgcaaggcactttgatagccagtatcaagagtagtgtaaatctttaagcccttgttcattacatcttcttcttttaagccataacgatcaattgcttcatccacaactgcgtcaaagaagtaaggatagcgataaccatcttcttgagaaaatgtatcttctaaagttaatgttgtctttttagcattatcagcctgagtctcagagatcttccctgtatcagccatcaagcctagcacaacattacgccgtgaaattgcattatccatatggtcaataggattataataactgggacttctcagcatcccggcaatagtagctgcttcacctactgttacatcgctcgcatttttaccaaaataacgccttgcagcatcttgaactccccaaacaccattaccaaagtaagcgttgttcaagtacatggttagaatatcttttttagagtagacacgattaatctcgattgcaaaaaagagctcttctaattttctagaaaaagtctgcttttgcgttagtaaggcattctttgctagctgctgcgttagcgttgaaccaccaccgacaataccgtggtgaattacactacttatggcagctctagccattcccttaacactaaaaccaggatttttataaaaagttcggtcttctgtcgcaatcacagcatcttgaatataaggcgaaatctgacttaattctacaaaagaacctttttgcgaataaagcgaacccgccttttgatttttattatcataaatagtagttgtagtagaaagagctgccttcatgttagagatgtttgaagtttttaccttaacggtataataagtacaaacgaacaaacaacacgacagcaatattaaaattaaccaacgccaaatttgaaaacggtggttgaagtttttaatcgctaaatgaacgcgatgccaaaactcgtgattttgggaatgcataaaattaaaactcccttttcgtcaataaaactaatatgacgattttagcatatctttatttgaaaactagtattttaaaagttaaaaattagataaggtggaaaagatgaccacataccattattttcttacatatcctgcaaatttaggaccaataagtgttaacgaattaatgcgcaaattattaattccaagaaaatggcgtcattttttgcgtactgaaaaacagattttaattaatgatcattacttaccacttaattttttagtaaaagctggtgacaagattgatatttatctagatcatgtcgaaagtgaccaacaaacttatcctgctagtggaaaattacctaaagtcgtatatgaagattcagatattctagtaattgataaacctactgggcaaaaaacgcacccaaatttagatgaaaaagatactgcgttaaatgattgtgctacttacctaggctacagtccctttattgttcaccgccttgatatgcttacaaatggtttattattagtggctaaaaatccggctgttgttccaatcttaaatcggcaattaactaataaaaccttgcaccgcgaatacttagcatgggtttctaaatcaaaccagttaaagcaaagcggaacaatttctttatccattgggcacgatcctgacgatcaaagaaaaagaatggtacgcctcgatggtcaaaaggcgattactcattatgaagtaattaaagaatgtgaaaataaggaactggtaaaacttactctagaaactgggcgcacacatcagattagagttcacttagcagcgctcggtgctccaattattggggatccactatataatccaaattatcaaaatggggaaaaattacagctaactgcttatcaactcacatttatggggccttttaagttcgaaagtaagactgttaaattgatagaaaaataaaagagatacgcaaaaatgcatatctcttttttcatatgcctcaaacaggagtcgaacctgcactcacttgcgtgaacagcgacctgaacgctgcgcgtctgccaattccgccattgaggcaacttgtagaacatatctatcataccaaaaagttggcaaaattgaaaagtcaaataatttaaaaataatccaagttgcatttgcgaactattgttcgtataatatcaattaataagaacaaacgttcagctgaaaggtaattattatgtatgactatcgctacgaaccgcatcgcttaatttttatgattgataataagagtttttttgcctcctgtgaggcgcttcgtttaggtcttaatccgatggaaacctgtttagccgttgtgtctagacaacctgacagttgctggggatccggcttaattatggcagcctctcctttagctaagaaaaaatatggcttgcataatgttatgcgcgtccgccaattaccgcctaaatggaaagcccctgatttaaagctagttgaaccccacatgaatctttatattaagcgcagcgttcaagtcttagatattttcagaaaatatgcggctaacgaagatatccacatgtattccatcgatgaaggaatgatcgacatgactgattcttggaaactctttggcaatggtccctattatgttgcacgcaaaattcaaaaagatattcatgatgctttgggactttatactacttgcggaatcggtgaaaatcctcttttggctaaactagcaatggataattctgctaaacacaaaaaatcgatgcttgctttttggcattatcttgacgtccccgatactatttggaaaatagaaaaattagaagatgtttggggaataaatactcgcactgctaatcggttaagaaaaatcggaattaacaatatgtatgacttagctcactctagtccttatcttctaaaaaaagaatttggaattattggtgaacaattattggcagaaagttggggcgtcgaccgtagtatcatcagacaaaaatatcatcccaaaagtaaaagctatggtaactctcaagttttaacgcgggattatttcaatcaacgtgaaatagaactggtcattagagaaattggtgagcaagtcgcggcccgtattcgcgcccataatttacgagcgggcaaagttagtctgtatattggcttttccctttttcaattgacggaaactactaaacgcggtggttttggcgttcaacgtaaaattactccaactaatgtaaaccatgacttagtaaaagaactgattgctttatttcgcgaaaactggcatagagaaagcgttcgtacgattagtgtcagctacaccgacttatcacctgatggtacacaacaattaaatatgcttgaagactttgatctgcaaattaaaagatataaattagaccacattgttgacaaaatacgaaaagagcatggtttcacttcgctagtcaaagcttctagcctactcaaaggtgcgactgctattgaacgcagtaatttagttggtggacataacggaggtaacgcttatgaataatgcgaattttgataaagagatccaaaattttttcaaaaattatcacgaccgtggaatgcagaaatggggtggctttttcttaagtgatcatactgttcaaataaataaagataatcagaaagctaatactacttataaaaaagagacagaaatggacctagaagaaataagtaagattttatttaaagcttttagcaaccattatcaaattcgattgcaacttaaaaatcgtaactataataatgaatttagaaaagatattactggttttgttgatggttatcataatagtcagataattatttcagggtacgcagttgaaattgaagatattaatcatgtggaaatattaagaataaacaaaaatgagatatgaacttgaatcgtccatatctcactttttacatataattgcttattagttcttctgcttgtttgagaatcggtaattctcggttggtaatcagctgtcccaacttagtactagtttgttttttatacgcatcaaccgcttcttcataagttaactttaacgttgataaatgaaaatcttcaatttctgcttgcgttagatgtttttcaccaaaagaaactattttacataaaaagtaattattaatgttgtgccgatgaattaagctataatagtcgcttactgtgccaatcttacaaagaatatcgacatttacgcccaattcttcttttagctctcttttaagtgctgtagttaggtcttcgcctgcttcaactccgccaccagatgtttcaatgaagatacccttaccgaaatcatcatctctctgtactcttacaaagtaatacttttgttgatcgtcaactacaatcgcacgaacaatttgtcgatcatgatcgatataggttttcggccattgtgtgtcttgtaattcgaggtttagttctggcattttttctccatatcaacttacttttcgattttaatcttaattggccaagatagcttaaagttctttatcttatttttcaaaatttcttttgactcttaaaaattataaaacgttacagaagttttaaaacttttatttttattttgatattcaaactttttcatactttctccttactagtacctattttttaatactttatccaaaaacttcggcagcagcaacaactttgatcaattcttcatctaccttatctctaccataagcgtctaaaaaacgatcgcgatattgattagtcttcaaattaaaccatagtgtccaaactccccaaaacagatcaatatggcgatcgccaacacctgcgcaatcaagatcaataaatcctgaaaatttccagttatccaaaataatatttggtaaacagtaatctccatgcagtaaaactttgctttgcaaggcatctttacctgctgataaaacttcatgagcttgttcagctgaccgatagccaaaactgtctggaaaactcgatttatcataatttcctgtccgataattattttcagcttttgccaaatattcggtcgttcgattcatcactgggcagtcactatagtctatttcatgcaattttcttaattcggtagcaattgtatcgtataaacgtttcggattagctaaatattcgttatcgacacaatctttacctacaaccgcttttgttaacagccaatcatgatcgtttgaactataattcaacacttcagcgcctaaatttttggaatgaaagtattgcgtcattttagcttctttttcaagtgtaccagttttggcgcattttaaataataaccgccatccctatcaataaaatatacacgagcctcaggagatgacgaactgtcataaatatctgcaccagcaatcaaatgcttcaattcttgcggtactttatttggaattttatcaatcagcgtctttttcattaaaatagtcccgtccccatataatgacgaagcaaataatcagatgctttctttaatgttaagtaattaatattattagaaaacagcataatcatttctttcgttctatagtttgcgacaaaacaagaattatatcctggaatacttccttctgctcggataacatcccccttgaagtagaccccgccatagtaagcgactgcctgacgtctagcttgctgagcatattcattaatcatcttaggatcttttaacactttgttatacacaaacttccaataatcattaggtgatataaataagtttcctgctccaaaatcagatgatgtcgtaacaactaccttatgccagtcaacattgctactcattggttgagaaacttcattttgcttaacttcagaataatccttaatttggtgcaattttaatggcttagcaaaatttttttgaatatagtcgttatagctcaaatgactttccttactgataattgctgctaataactcgtagtctacatcttgatagtcccacgtatgaaggtgatcgttttgcatatatttaagcatataagcaatttgttcttcttgatttttaagcggttcagatggacgagcattattaatcaatccacttgtatgattcatcaattcacgaatcgttatatcgctgctgcctgaaacttgtggataatatttagataaagtcgtattccaaccaagctcctttttttgctgcaaattataaattgcagttcctgtcataatcttttgcaaggaagcagttggaaatagttgatccacatttactatgtcatttttgttagacgtttcattattcttaatgacaacaggttttccgtcttttccgctaacgagcatcacaccattgatatgattcgatttcatgtaatttttaagctgtctttgtgagtttttaagtccaggatctatcctgcttcctgaaggtacaataaataaaaacactgaaaacatacagagcgccaaaaagatatagaagataatttttttatgatgcataactattcctttcatttaccgcgcaaagtacaagatgatattttttgcagaatttccttaattacttttctttaattgtatgcctaatctatcagtcctctcaagcaaccagcataaataaaaagtgtactaattccacttatttatggaaaagtacacctactattaataaaatttattattatttcttctcaagcaccgtcactgcttcaacatgccacgagctattatggttaattacacattctggataaaccgccacactaactaatttgctttgcctaataaaaagcattgagtttgttaactcgcttgcataacgtccaatattgccttgattttgagatgaacagcaagttccaaattgctactggtttgcgggaaaatatgggacctaaaaaggtatctgatcgtttgtgggaaataaaacatgcatttcaacagaactatgagccgaggtgatttcaaaaataaagctatgcaaattctccggagtaatgtttccatcaaactgtctaaattcccggataaagcccctataatttgataaatatttatctctatttattaagctatcatactttgctttagtcaattctttatcctcggcactaataaattgccgtaagattcttgccatctctactccctgcactatatcggtattcattaatttctctaaacgaggcttaaacgacaagatatatttaactctttcttgaagttcttctaaggtaatattttcatttggttgaatagttttcattatttatacctccccatgacaatatccttaacttcttgcagataatcatcggtatattccggaacaagcaattgaccatcaatggcatcgagcatgaccttttctttatccttcagcttcttatacactgtactgtcaataaagccagtgtgggcaacatcacctttggtcatcaaataatagtaacgagtgtattgatcagctgatagtcccaatcgattgatccgatcccgcgactgcaacataaatgtcaggttgaagttatattcaaagtagacagcatcgtgcacagtttgatgcaaagaaatagattcacctaacgtattaggattcgataccagtacttgcgcatcaccagtacggaaattattaatcattccttcacgatcttgttttggagtagcaccataaaccaatgtagtcttgattcccataccgttgagagtatcggtaatcttttgcatggtaccgacaaacatcccccaaacaagaacttttttaccctggctaactagtttgtcgatcagatcaatgcccagttcaaacttgggtgactcaattttggccagattatatttcttataagcatccccactgctggcattttctttttccacagttgaggcttgcttatcccaaacaccagaatccgcatctacaagacctaactctttatagttaatgttggttgctagtaattctggattagttgaagcttgcagcaatctaataaaagtagccaaagtaccattttcagtttcataaatagcctgtgacaacatctgctgattctttgatggttcaacttctttaataatgtcggggtcgggttttggtacatgtaaatcttctttattggtccgccagaaaaatgatgacagttttttgttcacatcttctgaatcaatattgtttaaggttgttaggtcccaagcaaagaaggatgagtattcatcagggtacatcaaatgcaaaaagttgtagatgtctctaaagccatttggaattggtgttccagttaaaacgtaccgataatgcggtgcctgactaagacttagagcagccttagcacgctgaccaccgacacctcttactcggtgaacttcgtcaaaaactaacatagttttagaatccagtaagtcattgatgatgttcagcttactttgtaaagattcatagttaatcgtaatcacatctgcttgaacccaatcatgcttaactactccaggattattattgtacttcttatcccgcatattaagataatgaagctgccgttttggtccaaacacagcttcaaattctgtccgccaggcagcgaatgcatttaatggtgacactacaaggagcttatcaacttcattcactctaggactagacaagtaggcaaaagttccatacatcatggcagtcttcccagcaccaggaactgaaaagttagcggctcgtttcatgatagtcataaagaaactagctttttcttgctctggctttaatggccgggtaatctcttgactaacaatcgttttgaaattatcaaattcttgctgccaacgaggatcaccatctttgatagttaacccagcctgactttgttctttaatgtaatactgtcgttgctgtacaaactgatcaaacttattactcgtttggacttcgggtaatcccttacgcttcagacgacgattaagcttcttgactaattcaagtaactgaacataagtcaaatcttgtttaaatgttcgttgtttagcatcttcgaagtaaggagcaaaaattgctaagccgcgctgagcagtcttagttttcagagtatggtgatcgtcatctaataattgaaacaggcccgcatcatttttaatgataattggactatctgatttcgtctccatacttgctgaacaactccttacttaattgatttaaatcccgcatatatttttggagttcctttaactgatcctcactaacctcgttataacgtaaacttccaattaatccgccatcttcattcagatcatggtagtatttaacattctgcttgatattgcgaatgaacttatctacagactcactgttgcgggcatttcgcatgtaggtatcaaatgtatcccctagcgattcaaccgtttcattttcatcagtcaaactctgcattaaatcagaggtattcttaatttcatcatcctggagagagtcggataaatcgtccaccatgtccgcaacatcatcgttaaagtcttcgttatccacactgttaacgatatttttactatattcacgtatatgagttctggcagtattcccactaacgcccacgtgaatttgataaaggatcacgccaaagtaagaattcatggtttcatttttacgaacttgtgactctggatcatcaccaaaatttttggacagtgacttacccatttcatagaacagcgaccaaactttgctttctttgataatattaaagttattttctggagccccaataaactctagaaactttttcatgtagaccgcaccatcataatatttcttaacttctgtcggacgcatatgtgagtcagctgcataatccgcttgggtcataattgggttatcaccactggtagtctggtaaatgtcaactgccaaatcaaccgggtcataattttgcctctcttcaacacccatctgaatggccaattccaatttcttgattttagctcgttcagtagtgttgtcatatgagaatggtaaaacaacggcctcaaaataaaccgttcgtccagacgtttggtgaatatcacgtaaggcagtataacgacgattaccatcaacgatccgaccatcatcaagaacataaccataaacctgttgaccagattctttgatcgatttctcagtccgctttaatgctgatgaattatcctgttcaatcaacttagcaacaaaattgttatattgcggatcttcttgatcatttgctgggtgtaattcatcgcgatactgagagattccggtcgcaattcgtccattcttatcgttgtaatagacatattctagtggaatcttgtaaacatccaacgtttcagagctaaccccatcaaccttaatcggtaacttgggcttggcaccggttttctctaactttccctctttagctaattcgattagcgacaacatttcagttcaactccccattttccaatttattgatcaaatcatgtacttcctgctcgctagtagccatctgatagtaaactccagattcctttaaatgatcgaagtacttttgttgaataatccttatttcttcatcacctaaacgcatgttttcagctttggcttcgatcaccaaatagattggcttactaccatgttcaatcttaaaaataaagtcaggtgtagtagtaccgttatcgaagcgaggtatcttaattgccttctttggtaacttaccaaagacactaatcttaggtccatatgagcgctgtaaaatctttaattctggatcagcactgtcataacgtagtggtggccgatcatacaagtacttttcatcagaagttgaatttgactgatatacacccaggacactagcaggtactgaatctacaaattcatgtttcttggcattataaatcgaagtagaagctgaaaatttcaagggttcataactataagaagttttgattcgttcgttaaattgattattaaaagttcgaattaagttccccagtgtcttttcattgatgtagttagtattattccttaacctcttaatggccttaatcattaagttgttcaataagtttacagatagatctgtttgctgagccaggattttaaggaacttaccatatttcatggtcaaatattcagtattatagtcggcctgcgtttctcgaacagatgccgaactattatcagtaaccacttcttggtggaccatttgtggccgctgcagaacgaaaatcttattatcgctatcattgaagacattacgagccacagtttcagcatcctgattaaccgacggatcaaactttatcatctgtcgcttggccaactgcagccacaaattctttagttgctgccagttttgttttcgcagcttaaccactgtgttatccttagaattcttatcccgaactctccccttagcaactttagtctgctgttcaagttctggataaagttggcataacgcatcatagccggacatcgtttgaccatcaagttcaacatttgctttgaacttgttagaacgggtaattacattgtgatcatccaggtcatcaagcagctgatcttcattgaattgtggatcagctttttgtttggcctggacaattagctcaatcatatcgtcagtaagttcttcttggttcaacttaattggtgaatcatcattgatttcgccaaccagtttctgggcaaaatcacgctcatcataaccaatcaagaatgataaacgactttgccattcatcttggttaaggcggtgtccagtttcatcaactggcaaacgtaagccacgaccaacttcctgaatcttactaatctctgaaccggaagttcgtaacttagcaatcgtaaagacatttggattatcccaaccttcacgtaacgtccacttagagaatagaaaacggcgcgtcagccagttgccatctttatctttgaagctaagcaacttttccttattgcttaaaatatcttcaacttctgcttggatatcagcatcggagcttccacgatcttcgctgaaataaccagcatagacgtcctgatgttcagactgtaagctctttaatgttgcttgtaaaaaggagtgatattccttttctcggtcatcgatagctaattcataacgttcaattagtttcttcagcttcttggttaaaatcttttcaaagtgttgggccaaccatcctttaccattattttccccacgaaaactggaaatactgtcgataaagaataatgatagagtcttgattttaggagcattatcacccgaatttaggcgcagaaagttctcttcttctgctttaaaatgacaatctaaggcttgagagataatttcatcctgataattctgagcaaaggtaccaggaataagtttcatatctttagataaagccaacccattagataattcacggtctgtccctccagcgtaagtaatgtttccttcaaaacctggatcaacatctgctaagttttcgcccacgctaagttggtattctttcttcccctttgtaagaataagtcctttagctttaacctgtttaaccttatatagattattagcttgctcctcagtcatgtcaggataatcaatatcaattcccttaaccaagccttggttaaaactatcaacagcatctaagttaaattgaggttcaccacgataataatcaatcttagtgatcttatttttaccccgtccactagtcgtttctggaaatgtagccccaaaccgaacaatcaactgaggcttcatttcttcgatgtcctcgtaaaatttcttaccacgagggaaacgttgtggttcatcaataatcactacgggccgagtagctgcaatagctttaattggagatgtttcgccacctaataaagtttgatcatagtcatcacggtgcatggactttgaatgcagcatcccctggttaaccagcaatacttcaatttgattagcgttctgtcgagtagcttccacaaattcagaaagttgagcgggaaagttccggcgccctgagcgcgcactaaaatcacctgcgttaatgacgtttaattgtacacgggtattttcataaaattcgctaaaatgctgtttagcataatcgctagtaataaagctgcgagtaccttccttaatacttggactgggtacggcaatgacgaatttgaagagaccatatttttgatgaaggtcgtacatcatccgagtgtagacataggtcttcccggtaccagtttccattttgatatcgatatttgctttatcgttataacggtacctaattaaaggattagcgtaaatataattggcatttggatcattagtcgtggtatcaattccgggaaaagccttatcgatcgcagttagtgcatcagtttggtgttgtaaagtttcaagtttaatcttcatgacactagtacctcttgattaacgtaactttactgtctaactgcttaagaccattttccagttcacgtaattcagcaacgttaaatgaatagccaaaaagaactacggattgaacttctaattggtgtgtgccaagctggttcagcaactctttagtctggtcggcaccccatccctcattgattaagtaaagtctgttatcttcaactttatgtgcagtgcagttgccaaattttacatcctgcacatcagcatcaaatgcataaccatctttagctaaccaagtagttaaaattgtttcttcaccgctagcatccccatcaatgttcaatgcttggctagaaaacccatcaaccatattggtaaataaattagtgttatttggatcgaagtcatcaatgtcttcgagagtttgcttaacaggtttcactacccggtagtgcttaaaactaccatcaaagtcttctggcaaagttaattcattatcttcacgaatctttttggcagcacgacgaatacgctcacgtgaaatctgatcaatggatctgaagccagcgtcatatgcagttttaccacccttagttggtacttctttgccatctttgttagtatggtaagtttgttcaggaagctgcaccataatgaatctacgatggccgtcatcttcggcattgagttgcataactgcatcagcggttgtggaggagccagcgaaaaagtccattacagttgcatatttgttgcctccaattctaactaacatttttattaatgatgttggttttggaaaattaaaatatcttttaccaaaaagctcttgtacctcattacttcctctttgattagttccatattctatcccccaaaaaatcattaggaatctgccccttattaagcatatcttttagataaatctttcgtcgaggcgaaccaccattcttttcgggccagtgaatgaggtctttcttttttaattctataaactcattttcaggtattagccatggacccttagctatatctccacttggtgttcttacatcataattaaaacgaccccgaacaggttctcttagacgtcccctaccgtaatatccacgtttgtcatgatatttataatctttctttgctttttcagataagggcaaatgtccaattttaaaggtatctgacttagagtaaacaagtatatactcttttactttagctaaagagccaatatttgattgaccatcctgacgtctccacgcaatattcgcaacaaaattattttcgccaaaaatttcatcacaaatttctttcaaattcgtgctttcattatcgtcaatggaaataaatattacacctgaattagctaaaaatctcttagctagtatcaatcttgggtacataaatgtaagccaagcggaatgactagatttcccttggatgcttttaagacgctcaacttggtcatcgtctaagccaaacatatctttcaatttctcatcactatattcaaaagaatcgggataaacaaagccatcgctaccagtgttatacggtggatcaatgtaaataacatcaatcttgttttgataattgttctgcaaatgacgcagcacttctaagttatcgccggtgaaaaagagattcttactatcttttccttcaccttgattttgcttttcatcgggtacaattacagtactcggcatttcacctgcctggcgacgtgcatagtctttaccgataaagtctaattgatatccttcgctcagctcattcacatttttgtctttcaattggtccttgaacttatcaagatcaaaagatccttctttggtaaaaaattcgggcaacttttctttcagttcatttaagaaagctgtgtttggctgtacagtttcattgtatttttcattatctgtttgcattaattattctcctgtgttgatgcgttctgtttcacaaatatcggcaaggttacaatttaaccctgagcatatcttcattaaaagatctgtagtaacgttggcattttttcctagcttagcaatagatgctgcactaatatcacattgtttttgcaaatcctttttttgcatgcctctgtcaattagtaacttccataattttttgtagctcatcttatagttgatttttaacttagtttgattgttgttcattccaagatctcccaaataactctttaccaccacgctctaatgtaagaacagtgtgcttttttataatttgttgtgccttgtctgaaagaagatcaatagtatcaatagaaatgaaaacctgtttattttcctttccatacatttcaatgatcttatccttgcgatctatttcaatgttagagaacatcaaagaatcatgaataaagaacggtaatctggttaactctaagcatgcctgatcaaaaagaattagacctttaaatgaggtacctgttccttgatcattaatagtttcaaaggaataattgttagctttcaattcaatatggggcggctgaaaagaggatgaaccacatatctcttcatttagcttggccattttttcatttagtaagtgctgaacttccgcaagctgagtattcacagttgtttttaaagcttcattttgatctttttgcgcttctttaagttcttttttcttctcataatttttattttcgtcttccaaccttttaagttcagctttttatcagcatagtcattaagaatagccgtttgaacgttaggagcttgttgatttttgatttttctagcttcagttactagctcgttaatatgatgatcaatttcactaatgtttgtctctagagaattcttctctttttcaaattcctctttcaaaaacttggtaacttgatgataaaacttgtcgatttcttctatcctgtttaaatcaatgtccgggaagaattgttgtaattctcgataattgcttctaaatttaccaggcccagcttgctcattagccttaacaacattaagtctactaatatatgtattcttgcagtctctcagttttgataaattttctctaatatttctaagatgttcggcctgtatttcatctagattcaatgttccttcattattctttgattctagatcagatagctcatctttaagttcagaaattttatcaacgttttctttgaactgttttttagtatctactattggcacatacttaaacgcacctgcatttttaaatactttataggctttatcagcgtcacttgcagctttttccctcgcctctatcggagaatatctatcaaatagcttcaacaaactataaacctgttgcttgccctgttcctgattaacagcttgcaacggtcttctttcattcactgtttgacggttataaacccgaataaatctgctaacagcgtttctaaaagataatccaggcaggtccaaattatattttttagataagaactttaaatattcatcccttgtcatccttttatccgctaaaggcttaaaattttcatcgcagacattgatgttttgaaaatcctcagtggatcttgaaaaatagtagtctttaccattaaattcaaaaataaatttgatagtatgctgtccaacattcttttgaacgtcgctatccttctttacgtaatcattccctccaaacacgaaatctaagatcattaaaaaggtagatttccctattgaattagttccaccctttccacctagtacaacatttagccctttaccaaaatttattggtcctcgaacctttccatcaataataaattgatcacaactaatttgctttaacactgtgtatcacacctgtctctttatcaatgcgaattttacccaaagtaaataaacaatctaaggactcaacaaattcgccaacatcatcaaaatatctttttgtggctgcaaaaagttgttgtggattcatagcatccttatctaaggcttttaaaattttaggtagattggctagtgtactctctttataatcagtaactttactgggcattttcaacttcaaacacctcacaattttgtacaaagaaagcaactaaaattctcgccgcttctataaaatcattttccaaatgttctttgtcaagaatccaatgagccagatgattaaacacttcactctgacttaatccttctcgtttaaatttgatatatgccaatttaattgttgtggccaggtcatcaaaactgaacgagttaccctccatacttgagaattgatctcttattttgttgtagtaacccataacataaaattgaacagcaccttgcaaagggtagtcattgttaatcttttcttctatcttatgcgcatcataagaaatggaattagtaatcttatcgggctttatctcttttaagccctttataactttgattaaattatcttctaaggttaactgattaagtcctttggcgagtttgtgttcaatatcaatacgtcttttttcattaactaaggtttgataattctttaatgttggattctcgagataaagatttgcacaatttaagcacaagggaattttattttccaaagcatctgaattttcaggtgctttttttattttggaaaattctgctttaccttccattgatagattggctggaaaaatatggaccacatcatatcctgcaattgcttcagtatctccatcagtaatcaattctcgtccacatagcggacatttaaattgaacatcgtgaactaactttaagtaggtaacattctttttatcatctgcaatatcgaattcagtcacagaactttttccttccttaaatttttctaggaaggctttcattatgtcaaaacatactttacctaatgaagcagaagtaacattaaaacttctttttctaagttcatctctaatacctttttttgccccaggagctgcaaaaacaattctttcaaaaaatcgatttccatcactgattcttttcaagatatcttttgcatctttttttggaatttttctggatccagaacagtacttgttaatcgtgtctgcttccttattatttaacggatttaaatctccgttttccgctttttggtcttcctcttctgtttgcggttcacggatcaacatatcaattaaatttttaaggaactctggtcggccttctttgttgctttctttagattctgggtcagccaggtaagtccacattatgtcaaagaaatcagaaaattccatattaatcacactctactttcggacaaaaaatgcccgattttgtctcaaactgtccggggtcaaattcttgtttccaatatactaattgtgaattaaagataatgattcaattcactatttaagtataccgtttacatatacgtttctcaatattatttaggcgatcgtgaattttatctatttaattcagcatgcatcgtcaagctaacgatgttccagcatgcttaccaaattgaatactttaactgcaaccagccactggaaggtttgctgcagtcccgaaacgaataagtttcggactgttttgcacactaccagtggctctttttgtcctttgccttcgtttcgggagaccggaatggaggttttattaatgaaaacagataacagtgagtatgaattaatcggtgaaaaggacggcaagttaatcgttagggtaaagcacatgggaaatcaggtaactacaattaccaaagcgcagggaaatattgtatttgactttaatcatgatcaatacaattcagatcatcgaaatgaaaggcatcaagataagttctttgctacctcattagaagatcccgacattaatgcaatcgatacgttagcggataggtattctatggaaatcacgtctgtttacgggaaagatcatttgttagatatgttaattaaaaatgaagataatcaactccgccaacaattagctaatcaattaccagatgctttaaagactttaactatcaaacagcggtatgctgtcctgagctactactgtctgaaactcagaaaaaggcaaatcgccaacaatatgggtatcagtaatgtcatggctggtagacatgttaaagctggcttagcaaagctgcgccaattctacgggatcaaaaagtaattaagaaaaagtgagccagagatggttcactttttttcttctcctggcaaatagatgtgaggaatgacccacacagtgatttgaaaggagataaaagatgacgaataaagtgtcaattaagcttaccaaccatcctcaagatggcattgtcagcatgcgcaacgtcacgatccgtgaacgattgctccgtttactactcggtaaaccacatcacttgatggtgatcacacctggcaaggatgttcaacagttacagattaacgaagtaaaggaggattcctatgagcgcaatgaatgatcttgatttaaaactcaaggaagctgagaacctgatcgatcaaaccaaagaagctattctatcccttcatgaattgctatcaagcaatcaaaatggagagcaaagcagccaaagcgcgatccaataaaagataaagtaactgtccgcaagatgctagcaaagaagagtgccgaaggctacaccacccaagtgaaagccttgctgcataagtttggtgccgaaaagctctctgacgtggaccccaaggattacgagaacctctactatagtgcggaggggttaggacaatgagttcaccaaaacatcacgctttgctatcagcttctagtgccaaccgttggttaagtgctccgccactcccacgattggaacaatattttccgcactccacttccaatgctgccgccgaaggaacggctgctcatgctttgggagagtataagattcatcgactgcttggtgataagttcaaacgcccatcttctgactaccaatctgatgagatggagagtctgactgacgattatgccagctacgtcatggaacaatacgaacaagcaaaagaatacgcacctgacgccaccatccgcgtagaacagaaactggacttctctcaatatgttcctgaaggcttcggcactggcgactgtgtgattgcttctgaccacctacttcatattatcgacttcaaatatgggaaaggtgtccgagtggaagccaagaataatccacagatgaagctctacgccattggtgccctagaaatgttcggtaacttgtacaacgttgacgaaatcaaaattataatttttcaacctcgcatggccaatattagtacttggaggattgatgccaagcagctcatgcactgggctaacaccgaactcaagcaaaaggccgaattagcttttgctggcaaaggtactattcgttatggtccctggtgtcaattctctgcttgcaacgcagtgctacgtgcccgatatgactaccaccataaacttactcgttttcagctttgctctcccaatctgttaacggacaaagaagttactgaggttctggaacatatcgatgacttaaaccgctgggctcacgaagttaaagattacgctgctgatttagccatcaaccatggcaagcagtggccaggttacaaaatcgtcgaaggtcgatccgtccgacactataagaatgaagcagctgtagcaaaaattgctgaagctaatggctatcacaatatttaccaaaagaagctactgccaattacaaagttagaaaaacagctcggcaagaagaaatttaccgaactgttcagtcaggaaattgttaagcccgcgggtaaaccaaccctagtaccaaattctgatcggcgccagggtattggtaaatcaaaccccaaggatgaatttaaggaggaaaaataatatgtcacaacaaactaagatcgttactggtattaacactcgtctttcttacgccaacatctgggaaccaaagtccattaatggcggtaaagaaaaatactcagtcagtctgatcatccctaagtcagatcagaaaacaattactgccattgagaaagccatcgatgctgccatccaagaaggcattggaaagtttggtggcaagaaacctaacaaagctactctgaagcttccacttcgcgacggtgacgttgaacgcgatgatgctgcctaccaagatagttactttatcaacgctaattcaattacggctccccaaattgtagacaagcatgtccaaccaattcttgatcgcaacgaagtttacagtggctgctacgctcgcgtttccattaacttctatgcttttaacaccaacggtaatcgaggcatcgcctgtggtcttggtaacattcaaaagattcgcgatggtgaaccactaggtggacatgctagtgctagcaatgacttcactgccattgatgatagtagcgacgatgatttcttagcttaaatcagaaaacgggtagtcactttggctacccattttttgtagaaaggattcctaatgaagcaaatctcgattgatatcgaaacttattctagtaccaacctgaatcaaactggtgtttatcgctatgctgatagcgacgattttgaacttttgctctttggttatgccactgacttgggaccagtcaaggtggtggacttaactcaaggtgaaaaaattccacaaccaatcgttaaagccctagatgatcccaccattatcaaaagtgcatttaatgctcaatttgaacgagtttgcctatcacgtttcgttgggcatcgcttaaagccagccggttggcactgttcgcgagtttggtcggctacccttggtctacccttatcgttaagcgacgtgggtactgttttagggcttcctcgtcagaaaattacggctgggaaagaactcgtgcgctacttttgtactccctgcaagccaaccaaatctaatcaaaatcgtacacgtaattttccttatcatgcacctgacaaatggcagcaattcaagcagtacaaccaacgtgacgttgaagttgaaatggaaatcacccagaagctcgaacgcttcccagtctcccaaaatgaatgggaaaactactggatggatcaggatattaatgatcgtggtattcggattgatcaacaactggtcaacaacgccattaaatgtcaggaaaattttcacgatcaatacttgcaagtttcgcagaaactaactggcctggccaatcccaactcaccactgcagttaaaagattggctcaaccagcggggaatgaatatcgactctctatccaaagcctcagtagctcagcttttgcaaactaccaccggtaaggttcatcaagttctaagcctgcgtcaactgttatcaaaatctagtgtaaagaagtatcaggcaatgcaaaaagcaatgtgccgagatggccgcgttcatggactcttacaattttatggggccaatcggactggtcggtgggctgggcgcttagtacaagtacaaaaccttcctcgaaattcaatgcctgacctagaagaagctcgtgaactagttaaacaaggcaacactactgctctttcgatgctttacgactcagtaccagacgtcctatcacaattaattaggaccgccttcatccccagccaagggcaccatttctatgtggctgacttttcggccgttgaagcgcgggtgattgcctggctgtcgggtgaagaatggcgacaaaaagctttcgctaataatgaggacatctactgtgcatccgctagtcagatgtttggcgttcccgttgttaaacacggagttaatggcgaactccggcaaaaaggcaagattgctgaacttgcattagggtatggtggctccatcggagcactcaaagctatgggtgcgactaatttaggtctaaccgaggaagaattacattcattggtacaaatgtggcgtaatgccagcccccacatcgtacagttttggtgggatatcgacaaagcagcaaaagaatgcattaaatcacatctaccgcaagccacccacggaataaagtttatttatcgtagtggctgcatgttcttacgattacgctctggacgcaagctttgttactccaagcccaaaattggtattaaccgttttggcagcgaatcaattacctttatgggtatcaatgcagtgaaaaagtgggatcgtattgaaacatatggcgcaaaacttgttgaaaacattgttcaagcaaccagccgtgacctcttagctgaagcaatgcgacgtttagaggatgcaggtaatcctgttgttatgcacatacatgatgaggccgtaatcgatgctccagccaactattcattagaaaagatggtcaagataatgaccgaagtaccacgctgggctgatggcttgattctcaacgcggccggttttgtcagtgatttttacaaaaaagattaatcataatggtttactttctgacctcatctggcttatcagtgagggctttttgagttctcaaaatattagaaaggatctgaatttatgtcagaagcaaccacggcaattgccaagctgcgtaataacaaaccgaatcccaactatcgtccgatgatctttgtgatcgcaccctttaccgaagtaataaaaggtaattcagcggacattatggcagttcgctcttactgccgctttgtctaccaaaaaggcggcattccggtttgtccacagctttacttaccacaatttattaacctgcataactcgaaagaatttcaaatagcagcctttatcaatatcgtgctgctaaccaagtgtgcggaggcttggtcgtttggcagcccaactcacgatacacgctacttcatccgccttgccaaacggaagaataaagaagttcgatactttaatacaagaatggaggattgctaagatgcactttactttatcaacagcagccaattccggtcaggccagtaacactatttaccctaaccagctaattatcactaactcccaagaattacagcaggccgtacagtatgaccatgtttgtgggcggttcaagaataaccaacgtaacattgcaaacttcatcaaagctgactgcttagtcatggattgtgacaatgaccactctgatgattctgccgcttggattaatcctaccagcattgcgaattactttgatggcgtttcttatgccattacattatcgcgcaacaacatgaaagctaagaacaataaagccccgcgcccaaagttccacatctactttccaattagcgagatcaataatgctaaaacctacgctgaattaaaacatgaaattcaagaatatttcccctattttgataacaatgctctcgatgctgcccgcttcgtatttggtgttcccagtacacaagttagttggcacgaaggatcccaaaccatcgaccaatttatgatggcgcaacgttactttgccaagcaaaaggtcggatcgattcgccaaggcaaacgcaatgcaactctctcccactttgctggtcgaatcattatgcgattgggcaatactcccgaagcacgtcaggcctttcaagacgaggcagcgaagtgtgaaccgccactgggagaacaagaactaagaaccatctggcatagtgctatcaaattcggccaccgaatggccagtaaaaaaggttatattccacctgaagaatataatcaacccaatgatgatctgcatccctacgattattcggatactggcgagtcctatgtttttgttaacaactgtaaggaccgcgtctgctacaccaaccagtcaggttttatgtggtttgacggtaaaatttggcaagaatcggagcccctcgctctcggcgaggttcaacgctttactgacaaacaacttgcggatgctcaactacgagtcactaaggcttaccaagtgatccaacaaaatggcgtaactagcgcgcttcaaacgatgggcaaaacgaaggctagtcgcacttttaatgatgatcagcaagctacgttcaaagaatatcaaaacgccaaggcttatgaagcttttattctcaaggaacggagcacccgtggcatcaatggaatcttgactaacgcccggccaaagttagtaaaagaaatcaatgaattcgatgctaatccctttttattaaacactcctgatggcccttacaaccttaaacagggcattcatgggcaacaagaaattcaagccagcgatttgattactaagtccacgtcttgtgtgcctggcagtcaaggaaattcaatctggcaagaagccctaaatacattcttttgtaacgacctagcactaataaattacgttcaagaaattgtgggactcgttgccattggtcaggtttacttggaagcgttgattattgcatatggcagtggacgaaatggtaaatccactttctggaacacaattgccaatgtactcggttcttatactggtcacctctcagctgatgccttaacaacaggtgttcgacggaatgtcaaaccagaaatggctgaagtcaaaggtaaacgcttaatcatctctgctgagctggaagaaggcaaacgactaaacacttcgattgtcaaacaactctgttcaactgatgaaatctacgctgagaaaaaatacatgaagcccttctcttttacacctagtcataccatcgttctctataccaactacctgcctcacgtgggcggtaacgatgaaggaatctggcggcgattgatcgtaataccgtttaaagccacgattgccaaacacaatgatattaaaaattatgcccagtacctaaccgaacaagccggtccggcagtgttgcaatggatcattgagggcgcgcaacgaatcattcaacaaaattaccagctaactactccggcagcagttactaaagcagtcaaggactaccacgccgataatgactggttaggtcattttctcaatgaaaattgcgaacttgattctagttatcagcaaaaatcgggtgacctctatcaaaagtaccgagaatactgccaaggtatcggcgaatacacccgaagtaccactgacttttacacggcccttaagaatgcgggctttcaacgtcaacgtaagaatactggatcctatgttcgcggactgcgcttaaaggcatcagaatttctcgactagcacctaacttacacgaatgattcatcagattcactgtcacagtaagcttttcggctaatttgtgttggtcatgatggtcatttaccttacttgtatatagaaataaaaaatttaaaaaaagagatatggaaaagagtagtaaatcgcctaacaccacttacacaaagcttgatggctaggcgattaggaaggattttcaaaatgttagaaaaacgaattgaatcagcttttgtaaaagctacccagcaacgtggtggactttgcctaaaattcacctccccatcaatgacaggagttccggatcgactggttctactgcctgaaggtcacatggggtttgtagaaatgaagtctccaggtaaacaccctcgcccactacaaatacaaagacttagccaactaaagcagcttggctaccaagtatttgtttgtgatcaatttgaacagatcggaggaatgctagatgcaatacaagccgcatgaataccaacaatacgcgaccaagttcattctggaacatccggtagctgcaatcttacttgacatgggtttaggtaagagtgtcattactctgacggccatcaagcaactcatccatcaagataaagttcaccgggtactagttgttgctcctctgcgtgttgccaagcaaacctggccggaagaaatcaataagttggatcacttaaaagatttaacttactcagtaatcactggcaacaaaagccaacgggtcaaggctgcccaaaaagaagtcgatatctacatcattaaccgagaaaacttaaaatggctcatcgaatcatccattccatttgattacgacatgctcgtcattgatgaactgtctagcttcaagtcttatcgctcccaacgcttcaaagccttaaaacgagttcgaccgttgattaaacgcattgtgggattgactggtactccatcgtccaacggtttgatggatttgtgggcggagttccgggtgctggatatgggtaaacgtcttggtcgcttcatctcatattacagagcaaactattttgaccccgacaagcgcaacatgtatcaggtgtttacttacaagccaaagccaggtgcagaacaaagtatttaccgtgctattgaggacattaccatttccatgaagtccaaggactacttgcaactaccacccttaacaatgaacaccgtgccagtaaagatgagtcccagcgagcagaccatttatgatgaattaaatgcgcagttagtggtttccacccaaggtaaacaaatcgatgcccttaacgctgctagtctttctaataagctttgccagatggccaacggttgtgtctatgatgatcagcaacaagtggtgcaaatccatcaacgcaaactagacgctatagaagatttagttgaagccgccaatggcaagccggtactcattgcttactggttcaaacatgacctagcacaaattaaacaacgcttccaggtacgtgagattaaaaccactcaggacattaacgactggaacgctggtaaaattccactggctttaattcaccccgcttcagccggtcatggtttaaacttgcaggctggtggctctaccttaatctggtatggtctgacctggagtctggagctttaccagcaaactaatgccagactatggcggcaaggtcagcaacagcctgtagtaatctaccatctcattactgaaggcactatcgatgaaaacattatgacagccttaaagcaaaaggataaaactcagttggctttgattaatgcggtgaaggctaacttgaaaggaagtgttgtagcatgagtattatgtggaattacttagacaaacggcgagcaaccgttgcagcattgaaagactacgatggcatgaagtttatcattgattcttaccacgacgatctcaaaataaccaaggagcagatgattggtgtaagttcacctcaatatggtcttgtccctggcaaccataacaaggacaaccccaccgagcctcgtttaatccacggtatcgatcaaaccgctaaactgaatgaacgttaccagcaagcgcgtctttacttcaagtggttcgagccatcctggaaaaagctgtctgagaacgagcgcttcgtactggacgcctgctaccgaacaccaaaccaatcgatgaatgaaggactgaccctgttgatggacaagttctttattgctaagaccactgcttacaataggaaaaacaaggcaatcgaccatctcactctcctgctctatggagcacatcactagaaaggtaaaacggagaataaacaagaagcttatccatgttacgatgatagtgtagaaaattaggacaaggcatttgctttataacatcacagcctggcaggttaacctgctgggcttttcttatgcctacaagaaggaggagttccatgccttactcacccaagaagccatgtcgttatcctggctgcccgcggctcacccacaacacttattgtgatgtccatgccaaacaagtcagctctcattacaattgttaccaacgtcccaagcgtagtcgtccacgttatcatcgtggctggcctaggatcagacaaagatacttactccaccatcccttttgtgaaatgtgcttgagtcaaggaagatataccaaggctaccgaagttcaccacgtactaccgctagaacatggcggcaacaacgactccaagaatctaatggcattatgcaagccatgccattcccgcattactgcgcaaatggatgatcgttggcacaaaacaccacatcgatatcattattagaccacggagggggccatcgaatcgttaaaaaattttgcgcgggagcgggcctgggccttcgtgtgtaaaaaatcgaaatcaaagggggtattaacccctgccggaaggagggagagatttggctaaagatggtacgaatcgtggtggatcccgaatcggtgctggacgtaaacctaaatcacttcacgacaaaattcaagccggtcaagatgctcaggtgattgacctaccaacaccaaccaatttggaaggccatgtgatgccgccagtcaagaagtacctcaaggccaaacagaagaatggtttagaattcgacgccgctgatattttcaaagaaacctgggaatagctggtcgagcgtggttgtgaaaagctagttaatactcagctgattgaacaatatgcggtaagtgtaagccgttggattcagtgtgaagaatgtatctcaaaatttggttttcttgcccgccacccaacaactgggaacgcaattgcttccccttacgtatcaatgagccgcgactacatgaaacaatccagccaattatggtttcaaatttttcaggttgttaaagaaaacaacgctacaacttaccaaggatctacaccacaggacgatgtgatggaacgcttgctccgttcacggaaaggaatgaactaatgaaatttgttaagaagaaaataacggacctcatccccgcggattacaatccacgaaaagacttaaagccaggtgatcctgactacgaaaagctaaaacactcaatgaaagaattcggctacgttgatccaatcatctggaaccaacaaactggtcgcgtagtcggcggacaccagcggttaaagattctccagaatgaagggatcaaagaagccgagtgtgtagttgtcaacttagacgaagaaaaagaaaaagcgctgaacattgctctcaacaagatcagcggtgattgggataaggacaagttagctttgttgatgactgacttacaagccagtgacctggatatttcattaactggttttgatgaggatgaaatatctgacttgcttgctaccgaaggtgatactcatgacgataatttcgatgtagatagcgagttgaataaaccgactttttctaaagctggcgacctctggcatttaggacggcacaccctattttgtggtgatgctacaaaaggtgaaggttaccaaaagttgcttggtgatcataaagttaaccttgttcttaccgatccaccatacaatgtcgattaccaaagcaaagccggcaagattaagaacgaccatcaggatgatgataagttctatcaatttttactagccgctttccaaaacatgaataaggtaatggccaatgatgccagtatctatgttttccatgctgatactgaagggttaaactttcggcgagcatttcgagatgctgatttctatttatccggttgctgtatctggaaaaaacaatcccttgtcttaggacgttcaccctatcaatggcaacacgaaccagttctttatggttggaaacaagatggtaagcacgagtggtataccgggcgcaaagaatcaaccatctgggaatttgaccgtccgaagcaaagtaaggaacacccaacaatgaagcctgttccattgcttgcctatccaatcatgaattcgacaatgtctaactgtacagttctggatccctttggtggttctggatctaccctcattgcctgtgaacagactaaccgaatttgttacatgatggaactcgatcctaagtactgcgatgtcatcgttaatcgctatatcgaacaagtgggttcagatcaagaagtcagtgtggaaagagttggtcacataattccgtacaataagctaaaaaaaccggcctaattcctcgaaagtccttgctatctgtatcttctagagtgatgtatacagtaatcaaacaaggaggtacatactatggaaattaattttaatgttcatggtaaacagcgcaaaaagctagtcgaacagattgctgaatacactcagcaaagggcagagtatcagtacacaccaacttatgcataccagattggtaaatacaccgtcagcaaggatggcaatcttttatccccagatgagattcctgctgaattagtaacatatcttaagcaacagggattcacatccagcgagacggtcaagttgaacataacatatcgccgcaatgagcttactgaccaagatctagataacctacgccatttaatctgggcaaaaggacaatcaatcaaagacgcttgccaactgaattccttgtctctcacaattgatgaccaacgtgtatccttcgattggttcaccgaagttaacactgatgacgctccagcttatcaacaattgatcgataaattagtgcaatacgcaaagagtcatcagcgaattatgtcaacgccacgtgatgagagtaatgaaaaatatgctttccgctgctttttactgcgtttgggttttattggtccccaatacaagacccaacggaaagtgctactcaaaaatttaaccggatcggctgcttttaagaaccaggaggcttagtcatgaacaaaatcaaagatgaattagccaaacgtgatcgtattcgccaacaggtattacaaattcgcaataccggtgaagtaaatatgtttgatgttgaaaacgtaaagcggctcgcttattactataattgccacgatctgatcgactatttgaccactgaccgcgccggatacatcaacctgatcttaaccggtaaatttaattagctaccaagcattgagttcactctcagtgcttttttagtatcaatgaaaggatgtgatgccctcttgcgaaagctaaaagactacacaccaactaggtttatggctaaggattctacctacgataaagatgctgctgactttgcagtgtcatttatcgaatgcctgtgccacacaaagggaacctgggcaggcaagcctttcgacctcatcgattggcaggaaaaaattattcgagatatttttggcatcttaaagcccgatggctaccgtcaatttaatactgcttacgtagaaattccaaagaaacaaggtaaatcagagctggctgccgccatcgccctgttactctgctgtgccgatggtgaagaacgtgcagaggtttatggctgtgcagctgatcggcaacaagctgcaattgtttttgacgttgctgctgatatggtacgtatgaatcctgccctgaagaaacgttgtaaaattcttgcttcacagaagcggttgatctacgaaccaactaatagcttttatcaagttctatctgctgatgcttattctaaacatggttttaatgtgtccggagttatatttgatgaactgcatactcaaccaaaccggaaactctatgatgttatgacgaagggatcgggggatgccagaactcagcccctctacttcttaatcacaaccgctggcactgatgagcattctatttgttatcaagtccatcaaaaaacaattgatatcatgaaaggtcgaaagcatgacccccgcttttacccagtaatttatggtgctgatcgggatgaggattggtcgagccccgaagtctggaaaaaagctaatccttctttaggaattacagtcaaaatggagaaagtcaaagacgcctacaactctgccaaggaaaatccagcagaggaaaataccttccgacagcttcgtttgaaccaatgggtaaaacaggacgttcgttggatgcccatggataaatgggatgcttgtgctttcccagttgattctaatgaactacggggacgagattgttacggcggactcgacctgtcgtcgactaccgatatcactgcttttgttctagtgtttccaccaagggatgattctgaaggttatacccttctgccctatttttggatccccgaagataatgttgacttacgagttcggcgtgatcatgttccatatgatatttggaaacgacagggttatctgcaaacaacagaaggaaatgtagttcactacggttttattgaacaatttattgatgatcttggtaaaaaataccacatcaaagaaatcgcctttgaccgatggggtgcggtagaaatggttcaaaatctcgaaggtatgggattcactgtagttccatttggtcagggatttaaagatatgaccccaccaactaaagaactaatgcgattaactctggaaaagaagatcgctcatggtggtcacccagtattacgctggatgatggacaacatctacatccgcactgacccagccgggaatatcaaacctgataaggctaagtcaaccgaaaaaattgatggcgtagtggccaccattatgggactggatcgtgctatccgaaatgaggataatggtgattctgtttatgatggtcgaggtttattgatgttgtaattgcgaagaactgaaaggagttgatgccatgagtctatttaataaattgttccataccaataaagcttcacccaaaaacaccctatccagcaccatgtcatttttcttcggcagttcgatggctggccaaaatgtgaccgaacgcaccgcaatgcagaatactgcagtttatgcttgtgttcgagtcttggctgaaggattagctgaactgccactccatatttatcaatataccagcgatggtgggaaaaggcgggcaattaaccacccgctttattttttgcttcatgatgcgccaaatccagaaatgaccagttttatctttcgcgaaaccatgatgaaccatttattactgtggggtaatgcctatgcacaaatcattcgaaacggtcaaggcaagatcactgggctctatcctttgatgccagatcgaatggacgttaaccgtgctgctaacggtgaaatctactacacctatactcgcaactatgatgattaccaggcaaagaataaatcgaagcaagtaattctcttgtccgatgaagtccttcacatcgcagggttaggatttgatggtttgattggttacagtcctattgctatggctaagaatgctattggattatccatggctgccgaacaatatggggccacctttttcaaaaatgatgccacacctggtggtgttctcgagcatcctaatgtagtcaaagatcccgaacggctccggaaaagttggcaatcacaattttcgggatctaataatcacagcattgctgttttggaagaaggaatgacttttcatcagctttccattccacccgaccaagcgcaatttcttgatactcgaaaattccaactcgacgaaatcgccagaatttttcgtgtaccaccgcatatggttggtgacctagatcgttcgacattctcaaatatcgagcaacaatcactagaatttgtaaagtacaccctgaacccttggtgcattcgctgggaacaagctatgaatcaacagcttctttccgctgatgatcaacgaaagtttttcgtcaaattcaatgttgatggattactacgtggcgattacgaaagccgaatgaatggctatgctattgggcgccaaaatggttggctgtctgcaaatgatattcgagaacttgaagatctaaaccgcatccctactaatgaaggcagtgacgaatacttggtaaatggcaatatgctgccactcaaccaagctggtaacttctatagttctcaaccatctaaagaaagtgaggaaccaaaagaatgaaacgtttctggaactggagtggccctcagaatcaacgtgtattaactattaacggtacaattgctgaagatagctgggttgatgatgaagtcactcctcaagtatttcaagatgaattaagtcaagggaaagggccgatcgatctctggttaaattctcccggtggtgactgtgtcgctgccagtcgcatttacacgatgctaatgaattatcccgataacgtgaacgtcaaaattgatggtattgctgcttcggcagcatcagtcatcgccatggcaggcacaaaagtttccatggtcccaaccgcgatgatcatgatccataatccattaaccattgttggtggacaaaaagaagatcttgatcaagctgcacaaatgttagctgaaaccaaagaatcaattatcaatgcctatgaacttaaaacaaaccttcctcgagaaaaaatttcatccatgatggatgatgaaacctggatgaatgtcaataaagcgattgagttggggttcgctgacgatatgctaggtcaaaacaaagatgtcacggattgttactcatattcagataaacaatctgaattggttctattgaacaagctaaaaccacaagcaaaatctaatatctctgtaaagtcgctgcaaaagcggctttctttgttatcacactaatttttaggaggacttatcaatgagtaaaattactgaattacaagaaaagcgtgcccgtatttggaaacaagcaaaggatttcctaaatgctaagcaaaaggaatcagatgtactctcagccgaagacaatgcccgttatgaaaagatggagcaagaagttgtcgacttaggtaaggaaatcaatcgacggcacaagcaggcagaaattgaagtggcactgaaccaacctacctgtaaggcccttactaattccccaactgctgatcagctaccaaagagacaggatgctcatgcaaaagatttctggaaaatgatgcgtggacatgccgtcgtggatgctcttaaggaaggtgcggaccccgatggtggtttcttagtgcccgacgaatttgaaaaccaacttatccaaaagttgcaagaagcaaacgtgctgcgaacgatcagtcatgtcatccaaaccaatagcggcgaacacaaaattccagtggtagccagtgaaggtactgcagcctggctcgaagaagaagcggcctacacagagtccaacactcaatttagtcaggtgtcactaggcgcacataagttggggaccctgatcaaagtatcagaagaattactaaacgattccgcatttgatttgatgtcttatctctccgatgaatttggacgccgactcggtaatgctgaagaacaggcctttttaaccggtaccggtactggtcaacctactggtatcctaaccgacactaatgtcgcttcagccggatccacagctgccaaggccgatgcgttaacttttgatgatttaattgaccttttctattccttaaaggcgccatatcgtcaaaacgctgtctttttgatgaacgatgataccgtgaaagccatccgcaaaatgaaagataagaacgaccaatacatttggcaaccttccgttcaggtaggccaaccagaccgaattcttaactgtccggtttacactagtccattcatgccgacattggctgctgctaataagccagttcttttcggtgactttaactactactggattgcagatcgagaaggacgaaccttcaaacgtctgaatgaactttatgccgtaactggtcaagttggcttcttaggctcacaacgagttgacggtaaagttatcctaccagaagcaattaaaaccttgtccatggctgctaaatagaaaggattgatgaaatgtggctgctattactttggccgaagcaaaagcctacctgagggtggataacactgttgaggatgacctaattacgaagttaattggatcggcaacagctacagtcgagaatgtacttcgtcaaccactatccgcattcgaccccctccccgatgatattcataccgcaattctttataccgtggcttacctttacgaatatcgggaaaccgccgattttgatgccatgatcaaatttctccgggccatcttgtctccttaccggaaggaggagttttaatgcaacaacaaaacaaacgtgttagtaagattgttgatattggtgaattagaccggcgcataacgctaatgaagaagaaatatgtcggcgaaaatcctaatactggaatgtcaatgtacaaggatgtacgtctgggtgatgtgtgggcaaaagtttccgccctgcacggacaagagtattacaccgctgtcaccgtaaaattggaaaagcaattatcattcatcattcgatatcgcgatgatattgatgaagaaaccaatatatggtttgaaggacgtggctacaatattggcttcattgacgatgttaaatacaaccacgagtatatggagatcaaggccgaatattcgaaaggagttgataatccaaatgaagacaactagtttaacggtaatcaatacgtgtttcggagctattggcgctttccttggctggtttttaggaggactcgatggtttcctatatattctcctgatttttatggtcgtggactatatcaccggagttctttgcgccgttagtgaacataaattatccagtgagattggatttcgcgggcttacccgcaaggttttaattctattattggttggcattgctcactgtcttgatgtgtatttactaaaaaatggctccgcaattcgcacagcaaccattttcttctatatctctaacgaaggtatttctctattagaaaacacgagtcgattaggattacctgtacccgataaattaaaaaatgttcttcaacaacttcataataaggatggtgacaagtaatgattccaggaatcgatatttctgaatggcaaggtcacgttgattttaatgcagtcaaagcaagcggcgtaaaattcgtcctaattagagctggctacggtcgttctgctagccaagtagatcattattttgcggaacactatgcacaagccaaagcggcaggtttgcaagttggtgcctactggtactcctatgcagtttcacctgctgatgcagccaacgaagctcgggcttgcttaaccgtccttggtaatcggcactttgattatccaatctactttgatttggaagaaaagtggcaatttgctaacggacgcaacttttgtgatagcttagtaaaaagcttctgtagcgttttggaacagaatggttgctatgcgggtttatatatttctcgttcaccactgcaaaattacatctctcccactgttgctcagcgttatgcaatctggatagccgaatatggtccacgttgtaactatggtggcaactatggaatttggcagcattattcaactggttctgttccaggtgtcagtggtaactgcgacctagattatgcctacattgactatgcagcagtaattgacaaaaaacagccagtcaccagaaaaaatcctgatcagctggctgcagaagtattgaatgggcaatggggtaatggtgtcgatcgtcaaaaacgtttaactgctgcgggttacgactactcagtcgtgcaagaaaaagttaataaattattgaatcgtaagtcagtcgaccaaattgcccgtgaagttatccgtggttcctggggaaatggtaatgagcgaattacccgtttgaaacaagctggttatgatccaattcaaattcaaaaacgtgtcaatcaattactctgatttatgcctgtggactccggtctgcaggctttttgttgtttctatgataaaatgctattaggtcggacttgatgggtcgctcccatcatgaaagacttagcagttaacgtggctacacacccctcaaataatctgaactgtggaggtgagagtcatgttatttaggaaaggactggaggagcagcaattaatgccgccttagttatcgtggcaatcggccagctagtcattgactgtgctaaagcctacgcgataataaaaaaagctaaccataacggttagctatccttcagtcacctgaactgcgtttgagggtaacgagatgccgctcgttgctctcttttcatttactaatgatatctgatatattttgatttttcaacttttagctggcagttttctgtcagcttttttcttttaccatggtttacttttccgcttgttctggcttatcagtggaggtaattaaacatggtaaaaaaagtacaaccagtgactcatcaaccactaatagcaacaagtacgaatattagttcagagcaattattgaacgatttgcattaccaacaagcaaaacagatcatccagactctacttaataaaggccttatttcgcccaccgaatttaaagacattgattccttaaataaacaatcatttccaccattattagggcccggaaacgttgatacatcaagccttcagagctaacataccacactgacgaaaggagggttgtcatgtcaaccattactaaaatccaaagctaccaccgtaatgtcaagcaactccgtgtagcagcttattgtcgagtttcgacggacaatattgaacagctggagagtcttgaaaatcagcgtgaacattatcaaaaatacattagcaatcatcctaactggcaattagctaagatatattacgatgaaggaatctcaggtaccaaattgacgaagcgtgatgccttaaaagaattactagccgactgtcataatcacctaatcgacctcgtagttaccaagtcgatcagccgcttatcacgaaacacaaccgactgtttacgaatcgttagagagttacaacagctgaacatcccaattatatttgaaaaggaacatatcaacactggagcaatggccagcgaattatttctatcaattctcagcagcattgctcaggatgaatctcattcaaccgcaggaaatttgcgctgggcgattagacagcgtttcgctagcggcgagtttcgagtatcttcggctccctacggatattcaattgaagatggcaacttagttattaatcaggctgaagccaggattgtgcgagaaatctttcaacaattctcaaaagggatgtcagctagtcggattgctaaaggattgaaccataaacacgtagcaacaaagcgtggtggacaatggcgaagcaacaccgtgattaacattttacgaaacagtaattacaccggtgatatgctctgccagaagacttatagtgatgatcaatatcaccgtcattttaaccaaggtgaactcacccaatacttaattgaggatcatcaccctagtttagttaaccacgaaacttttaacagagttcaagttctgcttaaagaagcggtctaaaagtgccatattgaaactggcagccataagtaccaacaccactacttattttctgggaaaatcacttgtggcaattgtggcactatttttaagcggcaaacacgtcccaataaaatttgctgggcttgtcaaagacatctaagttccgctaagcaatgtactgttaaagcagtaactgaagtaagcctagaagcagctttctgcaacatgatgaataaactcatttacagtaggaaattcttattacagccattgttagcaaatttacaagttcaagctaacagtgataccaacggtcagctaagttcattggtcaatcaggttaaggcaaatgactgcaaagcagaaacgctaaccgaattgatgcaatcaggattgctggataaagccatctatgtaaatcaaacggctcagctcgaacaggatacctaccaatgccgcgaaaagattaaacagtttaatagcaacaatactgattcggcaaataattttgaaaacgtgcgaaccctgcttcattggtgtcaacaaggtcaaaaactgtcaggctttaataaagccccatttcaggacttcgttcaacaaattgtagtgaacagtccaaaagaggcggttttcaaactgaaatgcgggttgagattaactgagaagttaaccaaagcagcttgccttgatgaacacttttaccgtggggtaatccgccaacgtttcagcgaaccaattcggcaagcagaatacttgtacagcattatcgaaagtgaaggtgatttaattgggtaaagtacgcattattcccgcccatcagcaaaaaggaaacagtgtccatcatccacgtagtccacaatcttttggaaagcttcgagtggctgcatactgccgggtttcgaccgattacgatgagcaggccagttcttacgaaactcaagtagatcattacaaagaactaattcaaaaggagccaccctgggaatttgcaggtatttatgccgatgatgggatctccggaaccaataccaaaaaacgggaacaattcaataaaatgattgcagcctgtaaagtcggtaagattgacctgatcgttaccaaatcaattagccgatttgcccggaataccatcgactgtttgaaatatatccgtgacttaaaagctatcaatgttgcaatcttctttgaaaaagaaaatatcaacaccatggatgccaaaggtgaagttttgattaccatcatggcttcccttgctcaacaagaaagtgagtccttatcgcaaaacgtcaagatggggattcaatatcgttaccaacaagggaaagttttcgtgaaccataatcactttctgggttataccaaggatgctcaaggtaacttggtgattgaaccagaagaagcaaaggtcattaagcgcatcttctatagctacctaaacggaatgacgatgaagcaaatagctgattctcttaaagcagatggtattttaactggtggcaaaacaaagaattggcgttctagcagcgtggccaaaatcctgaagaatgaaaaatatatgggtgatgctctattacaaaagacttacactgtggactttctgaacaaaaagcgcgtaaagaacgaaggaatcatgccacagtactatgtggagaacgaccacccagcgattattcctaaatcagtgttcatgcaagtccagcaaattatcaaacagcgacgtaacggaatcacgactaagaacggcaagcaccggcgaattaacggaaaatactgcttttctcaaaaagtattctgcggtaaatgcggtgatatcttgcaacggaacatgtggtatcgacaggaaaaagtggcagtctggcgatgtgcaagccgcgtaagacgcaataagactggccggcgatgcatgattcgaaacgtcaaagaaccattgctgaaggaagccaccgttgaagcattcaatcagctcattgaagggcatgagttggccagtaaacaaattaaagctaacatcatgaaggtcattaagaactctaaaggcccaacacttgatcaaatcgaccaacagttggaagaggtgcagatgaaattgattcaagctgctaatcagcaccaggactgtgatgccctcacacaacaaatcatggacctacggaggcaaaaagaaaaagtacagagtcgtgaaactgatcaacaagccaaactgcatagtattgatgaaatcaatgaattggttaatctgcacaaatatggcttagtagattttgatgaacaactagtccgtcgtttggtagaaaaaatcaccatcttccaacgttacatggagttcacgttcaaagatggtgaagttataagagtcaatatgtaaaaaattgagatatttggcactcagctattttggttgggtgctatttttttgttactgcattagctgtaactccacatacttccaaagatcttctgtatcttttagcttcgttaattcattgtctactcctattttatatataagttggaatataatcttgcatagttcaaagtacatgtcctcagcaacttccgcccgtccattatgaacaatattagaccttacatcataactttgcttcataaaggcatttaattttttcttatcttctatatttgtacctaaaagagtatagatagacatacttatctgactaacaatagaaatactgttgctctttatttcaagaatcgtttctaaagctatcattgcctgcaaaaaagacattggtatattacttaaatctgctaagctcatccaatctatagctatacatatcttttcttgcaatttcgtcaatgtttgttccttttgcacgtctattaagaattcaaagttgtgtactgtacttgatatgtcctttagtcgaatttctggtataggatcctttactcttgacctaccaaatgtacctttaccatccacaaatccataatatttatcaatatcgttatgaactatcacttcgttaataggatatatcttaatctgaaacttattatcatacattaagtttacgaggcctattattcgattagctttcttttttgctacttcataggttctatcattctgtgcaccctgaacagtaacaatcaatactgcattatctttacttaatatattttctaaatctgtactatgacttaaattaagcttatttttgatatatttcgtactagcaaaataatctctagaatcaatttgaattggctgttgcgggatttgaattccagacgttaaaaagatatacgacctttgtgtttgcatttcttgtcgccaagattttaacttatctcgaaatgctcttttgtcaatattcaaatggcctttaaacagtaaatcgctaagccagttacttaccatctttttcacatctgcaatgctataaccaggcaaattaccttcttctactttgcgtaaaatatcgttgcatatatcattgtactgtttcaaattattttggttaaaatataagctctttgaaggacaaaatggattttcctctattctgaagtacattacattattgctttgctgattttgcttcaatgctccaagcaattcattaaagttttcaagagttttatctttctttttgctcacttaatacaccactcttcatatcatgtcaatagaatttttgccttgttatattatacgtcgagtacacaattgtcctgcaaattttctatttttcgagcaaaaaggtcaaaatgcaatagcatactcgtcaactcaaccctcagcactaaattggccgattttcgtacatgccataaatactactatatcaggcttgggtccacctttcactaccctaatcgacacgacctgccaaactagacattcgcctactcgactatcgaaataggacatagaacactcgacccgccagcttcaaatagaaaaagtgtactaatttcaatcgtcaaaaccataattagtacactttcaatcatccacaaataccgtcacaccagcgtttatagcctattttcctgtacgttcaaggaccgtaacagactccacatggggagtttgagggaacatatcgacaggatcaatctcattaaagtcataaccttgctcacggaacaattgcagatctctaaccattgtagctgggttacatgaaatataaacaatcttcttaggatgagtttcaacagccgcatcaataaattctggcgttaatccctttcttggtggatcaacgaagataacatcagtcttaagcccctctttagcccaacgcggcattacttcttctgctttaccaacaacatattcagcgttgttaataccatttaattttgcatttgcgttagcatcgtcaacagctggcttgataacttccatccctcgcactgccttcacatgcttagcaactgacaaaccaattgttccaattccagaataggcatcaattacaacgtcatcgggtttaagatcagctttttgaattgccaagtcatacaagcgcggggtttgcagcgaattaatttggaagaaactttgtggtgaaatcttaaaactaacatccccaattttatcggtaatttgaggctctccccaaagcaaataatcttttttacccaaaattacgttagtctttttaggattatggttcaaaacgacgctagtgacacctttgatctcactaatttccttagttaccttctttaactgtggaaactccttgtgcaagcagaccaaaattaccataatctcgccgcttgcctttgagcgacgtacatcaagataacgcacttcacccttattgtgaatctcatcataagctggaacatgattctttcttaaaatatcacgaactttaattaaaactcggtcaatctccggatcagtagtaaagaaattagttaacggcactaaatcatgcgaatgctttctaaagaaacctatatcaagcttgccgtgaacctcacgaactggcacttgtgccttattacgatagccggtttcttctggactaggcaaagtctgactaactttaatattatctaaatcggccttgtgcaataggttcaccacttgattgcgtttaaactcaagttgcttatcatacttaatatgagcaagcgaagctaagcctgtttgaacccattgacgaagttcaacgttaattctatctggactttccttcttaattttctcaattttagcgaaggcaaaattcttctttacctttaaaattttagctgaaacaacctcacctggaagagcattgttcacaaagacagtcatgccgtctaagtgagcaactcccattgcttcataagataggtcggtaatttctaaatcgacaatttgattcttttgcataatttcaatcctttttagatacttgttactatttactaaaaaatattattgctttttaaaagaataggcactaaagatacttaaaataaatcctaaaatcaagctacaaatgattaagctccaagatccaaaagcaaaatcacccttaagccacatattatttaaaagcatcccccagtcaaacggccaccacatactaaaagctgtgcgacttaagaacatggctagaattgaacttaaaaatccaatccctaaggcaaaatataagttagtaactcggcaaagccatgaataaaatggaactagccaaacagaagtgagcaaaattccagctatagaaccagccattaacccgatttcttcactacttgaaaaaatgaatcgtacacaaattactaaagccaagaaaatcacgctcattaaagccgcttgtaaaattccatgaataatgcgcccaatttcataagtgaaaagatcttgcggtgaagataaaatttctttgaattttgtagcctgtttttgataataagtactaatacctattactaaggcaattgacatattcaaccaaaaataactccactgtcctatcatcaattgcactgaatattgattatcccaaaagacagcagtcatcattaaaatagcaattaatggcaaaagccaaacaagcaaacgaataatagtatgctttgtttttaaaaattcaacttttaaaatattagtcatgctttatgcctgccttttctagagttgaaataaataaatcttccaaatctgtcttttggtcataatcttcttccagcaaaagctcaccattacctaagatagcaatacgatcagcgactttttgaatttcagaaagcatgtgactagcaataataattgtctttccttgctttttctctaacattaataattcacgcaattcatgaattccaaatgtatcaaggccatttgttggttcatctaaaaccactaagtctgggtttcccataaaagcgagcgcaattcctagacgttggcgcatccctgttgaaaatcctttaaccttttcttgattatgatcgccaaaacctaacgtgttcaaaatttgttcttgatccttattttcaacatgatgaagttttaatttcaatttgatattatcttcaacagttaaattatcaaataagcccggctcttgagaccgtaaaatagtttgtgtaaggatgaattattccttaatttaatttcctaaaacattagaaaaaggagttcctttctcgtatgattggtttgaacaaaaaaacatacagaaagaagaactccttcatgaatgattttaccaaaaatataactcaagctctattcaatcaagataaaattaatgatttgcttcgtcatgaaatccaacaagctgttaatgacatgttagaatctgaactgactgcctttttaggatatgatccctatgctagaaatggctggaatactggtaattctagaaatggtgcgtatttccgtaaaattgatacccagtttggatcaattgaggtacaagtgccacgagatcgcaatggtatgtttcatcaacacactctgccagactataaacaacatactgatctcttagaagatatggttataaagctttattctaaaggtgtaaccactagagaaatagctaatttgatcgaaaaaatgtatggcagtcattatagtccagctcaagtgtctaatatctctaagcaaatgattcctaaagttgaggcttatcacaagcgtaagctgagcgataagttcttttgtgtttatcttgatacaacgtatataccgttgcgtcgagaaacttttgaacgagaagcagtatatattgccattggcatcaagcctaatggtcacaaggaagttatcgactactgcattgcgcctagtgagaatattgaagtctggacggcgttgctccagaacatgaaatctcgtggtttaaagcaagtagagcttttcctttcagatggcgttgtcggcatgaaagcagcactggcaaagacctatcctcaagctcatttccaacgctgcttggtccatgttatgcgcaacatctgcgctaaagtacgcgtggacgatcgcgaggcaatcatgaacgaattcaagcagattcaccagcaagccaataaagcggctgctgttgatgtattgcatgctttttatgccaaatggaacaagagctacaatcgtgtcattagaaacctgaaagacatcgagccagacctgcttgttttttataattatcctaagcagatcagggcttcaatttactctaccaacatgatcgaatcctttaataacgtcattaagcgcaaggctaagcctaaagcggagttcccgactgaacagtcgcttgatacttttattggcatccaagcaatgagctacaatgaccgctacttcaaccgaattcacaaaggctttggtcaagtccaggataccttagaatcctattttgaataaataaaacgttaaaaaaacaatttacgagaaagatctatttacacaaaaaatttgacagtttccggctcttcgattaatgaaccaatagtttttaaatcttctcgcttccagttttcacccttaaaattaatgtcgccttcagttggcttctcaattccactaatcattttcaaaagagttgacttaccagccccattcggtcccatgatgcagtaaatttttccttcaggaacatgaatattgatccgactcaaaacatgtttatttttgaagttttttcctaattctttggtggttaaaatatcagtcatcttaatccctcaatttaaattcatactttttttctatacctatctattttaccgctcagagtgcataattcgaaattctaatcatttttattaataaattcattgacatctttttttaagcttgttatcataattgcaataattatcgtcacagtagtgcttatgttaagcgtcagagagctggtggtaaagtgcgaaccagtcaggcataagttacgaattacagcgatcaatcttttattcggccacaatcagtgccgttatcacctgataagagtgctgcaaatatgcagtaaataggtggtaccacggtaatgcgtcctgttgattaatttcaacaggatttttttatggaggattttttatgaaaaagaaagtatcttttttagaagcaattattattttactcttgcttttaattattctaggtatttcagtaattaaatttggtttaatgccagaggttccggttctattcacagtctgtttattagttttctggcttagactccggggaaatgactgggcttctattcaagatggaattaaagaaggaattggcgttgccattattccgatctttatttttattctaattggggccttgattggcttgtggatcaagggcagcatcatcccttcaattatggtccttggtttccatttaattagtggacaattcttcgtcccttctgtttttatcgtttgctcaatcgtaggtctagctattgggagcggctttactacaatttcaacggttggaattgccctttttggaattggtgccagcatgaatgctaatccagctcttgttgctggagcaatcatttctggagcagtatttggcgataaaatgtctcctttatctgattccaccaatctttcttccgctgtggcagaaagtgaactatttgcccatatcaaaaatatgatgtggtcaacaattcctgcttttattgtttctttaattcttttttggattctaggaaacagcggctcaattgatgcttcaaagatcaatcatactgtcgcagttttacagcataactttatcattacttggtgggcaatcattccaattatcttaatgttaatttgtgcctggagaaaaatccctgctattcctaccctatttttgaatattgctgtcactgtcattatgatttttattcaaaatcctcatcaatctcttaccgacttaactaaccttattatgaaaggtttcgttgccaaaactagtgactcatcagtgaatgctttattaactcgtggtggtatttctagcatgatggatacggttggcttaattattgctaccttatctcttggtgggttattaatgaaatttaacattgttcaaaccgccatggaacctctagttgaacaccttaaaaagcctggtcggttagtaattactactattctttcaggtatctgcattaatttatttgtcggtgaacaatacctctctgtcatcttgccaggacgcgccttcaagcaagcatacgacagaattggtctggtaccacttgccttaagtcgtgttcttgaagatggaggtagtgtaattaactacctaattccttggggagtagctggttcttttgcagcttctactcttggagttccggttttagcctttattccattcaccttcttcagcctcctttctcctgtcttttcaattctttctggggtcagcggaattggcctaaagtggcaaaataaggcagaaaaataatttatcatcaataaaatccgtactatatgcgcttacatagcaaaatagtacggatttttcattaacgaaacttttaatacattgtaaattattagtaattaaaaacatattaaagggggaatttgatggaaacaaatcattttctagtattacaaaccgacttcggtttaaaagatggtgctgttagcgccatgcacggcgtagctcatttggttgctccgcacgttgctgtttcagatttaactcatgagattccgccttatgatatttgggctgcatcttaccgcctctaccagacaatcaaatattggcccaaaggcacaacttttgtttcagtagttgacccaggtgttggctcagatcgaaagagtatcgcagttaaaacaaaaagcggacattttattattacacctgataacggctcattaacacatgttgcaacttatatgggacttgaggaagtaagagaaattgatgaacaaaagaaccgtcttccttattcttcagaaagtaatactttccatggccgtgatatttacgcttataacggcgcccttttagctgatggcgaaaaatcatttgaagatctaggagagccattagatccaacttcagttgtgaaattgccacttaccgaagccaaattagaaaatgatcatctaacgggatcaattgatgtattagatattcgctttggttctttatggacaaatattccttatgacttagttaaaaaagccgatatcaaacgcggcgacaaacttactgtcacaattacttatcaaggtcaaacctattatcatgatacaataccttttgttacatcctttgccgatgtagcaatcaaagatccattgatgtatatcaattcattagtcaatgtcggtattgcactaaatcaagcttcatttgccgatacctacaaaattggtactggaaatgattggaaaattgatttaactagagaataatttatttacgggggaaaaattatgaacaagcaaaaaggtttatcagtaaaaagcgttgttgcaattggtattggagcagcaatctatgttattttggcacgtttcacatcaattccaactggcattccaaacactaatattgaaattgtctacccattcttagctttacttgccactatttatggtcctgttgttggattttctgttggtttcatcggccatgcactaggtgacttcttaatgtatggtcaaacttggtggagctgggttttggctacagctgttttaggtttaatcatcggtctttatggtatgcgccttgacttagataatggcgtcttcactgttaaacaaatggttggctttaacgttgtccaaatcattgctaacgttatttcttggttattaattgcaccagttggcgatatcttaatctacagcgaacctcaaaacaaggtcttcttacaaggagctactgcaaccattactaactcactttctattcttattttaggaaccatcttgcttaaagcttatgcagcaactaaagttaagaaaggtagtttacgtaaagactaattacgaaaggttactcaattaatgacagaaccgattattgaatttaaagatttttcatttaaatacaatagccaagcagaacccactcttaaaaagattaatcttaaaattaataagggtgaaaaaattctcttggccggaccttcaggcagcggcaaatctacaattggtcgctgccttaatggtcttattccaaatattgatcaaggcaacatcacgggcgaatgcttagtaaatggaaaagatattactaaaactagtctttttgacttctcatttactacttctacaattttacaagatgcagacagtcaatttattggtctaacagttggtgaagatattgcttttgcacttgaaaatgattgccagcctaaggacaaaatgcatcacactgtaaatcaatgggcagaagaacttcaaattaaagaactacttaaacagtcgccgcaaagtctttctggcggacagaaacaaatcgttgccctagccggcgtcttagttgatgaatcaccaattttgcttttcgatgaaccactcgctaaccttgatcctgcttccgggctcaagacaatggctattatcgataaaatccaaaaggaacttaatgccacagttattattattgagcaccgtgtcgaagaagttttgagtcaaccaatcgatagaattgttttagttaatgatggcaaaattgtcgcagatgagcctactaatcagcttctccatgagaatagtttagaaaaaattggcgttcgtcaaccactttacttaaaggcgatgactgctgcaaatatcgacttaagttcaattaaaaagctagacaaaatcacagacctgcctacttctgactcaatcagcaagcaactagaaaattgggttgatcaagctccagttaaagaaaacacagctactcatcaacctttattaacactagaccatgtcggtcaccaatataataagaatcagccttatcctttaaaggacgtttctgctactatcaatcaaggtgatttcatctcaattgttggtcaaaatggtgccggtaaaaccaccttatgtcgcattatttgtggttttatttctaatgaaggtaagattacacttaaagatcaagatctagctaatttatcaattaaagaaagagctgaaaaaattggctatgtcatgcaagatcctaatcaaatgatctcgcagaaaatgatttttgacgaaatagctttaggattacgtctgcgtaacgtagatgaagaaacgatcaaacaaaaagtaaatcaaactttaaaaatttgtggtctttatcctttcagacactggccaatttctgccctcaattttgggcagaaaaaacgtgtcacaatcgcttcaattttagttctagaaccagaaatcattattttagatgaaccaactgctggtcaagactggaagacatataccgaaattatgggctttttaaagcacttaaacaagctaggcaagacaatcattattattacgcacgatatgcacttaatgcttgaatatactacacgctctcttgccttcactaaaggaaaattaattgctgatacaagccctattgaattactaaccaatcccaagctaattaaagaagcgtctttaaagagaacaagtttatttgaacttgcacagcattaccacttgcctgatccaaataaatttgtccaagcttacattaactctgaacaaaagaactggaaggatgaagattatgaatgatagtaaaattttaggctaccagccaggaaatagttttattcatgccttgaatgctactacaaagatgatctttttaattctggtttcaattgcgtgcatggttacttacgatacccgctttttaattgcaatctgtatcttatccttgatcttactaaaaatagctggtattaaatggaaacaggtttcttttattgttaagttcatcattgtttttgctgtaattaatattttggcagttttcatttttcaaccgacttatggcgaaagtttataccactcaaaaacagttttaatcaatgctggatactttaccttaactgcccaagaattattttatttgcttaacgttagtttaaaatatatctgctctattcctttagttctgctctttttattaacaaccaatcccagtcaatttgctgctagcttaaataaaattggtgtgagctataaggtgtcttacgctgtttctttagccttgcgctatattcctaacattcaagaaagctattggtctatctctgctgctcaacaagcacgaggaaatgaactttctaaaaaggcatctcttggaaaacgaatccacggaacattaaatatcgtgaccccacttatcttttcaagccttgaccgtatcgatacaatcagtactgccatgcaacttagacgtttcggttcaaagaaaaagcgaacttggtatgtagctgaaaaattcagcttagctgactatttagttaccagtctagccttcattcttgttttaattgttattttgctcttcaaagttaactcgggacgcttttacaatccatttgtgtaaaagtttcttttactgttaagatacgttaaaatatattaataataatgaaagagggagagcttatgaataacttttcacaagaaccagaacgtcgcacaatcgttgacgtaactggcttaaatagattcttaagcagaatgtacggcatgatgacaatcgccgttttagtttctgctttaagtgcttacttaacgatgactgtctttagaactcaagtaatgaccttatttgctagcaacccagcaatgacttggattttattgttagttccacttgcattaacttttggaattagctttagagcaacaagaaatccggtagctagtttcgtcatgttaatgattatggcaattgtttacggagttgaattttccttaattgctggtgcctatactggccgcagcattgcttctgcattcgttgcttcatctactgttttcattactatggcagtaattggtacaactactaagaagaacttaaataatcttggctcttatgcttctgctgccttgattggtttaattgttgcaatgcttatcaacatgttcttaagaaatccaatggtttcttacatcttttcatttatcgcagttattatctttactattttaactgcttgggatgcacaaagaatgaaacaaatttacgaaaactatggtggtcaagtttcagttgatggtttggctgttgcaggtgctttagcactttacctagacttcgttaacttgttcttacagttcttacaaatctttggatttatcgacagaaattaataatatttatgaaaaatgcgaggtgcttttgaaagttacctcgcatttttattttgtgttcaaattttcaaaaaatttcaaaatttttttgtccctcttctcctcccattctcatgcaatttttcccaatacaaataacaatctatagtgcttttatccaggaaaaatactagatattgtgttatcctcttaagtgtcgacaagatattgtactttagggagagataaaaatatgtctgatttgagaatcacacttgatccagatttcattgcacaaactaaaaaagaagttactcctcactggggtgagttaggctgggttacttataaacgtacctatgctcgctggcttgatgataaaaatcgctctgaaaattgggacgaaactgttaaacgcgtgatcgaaggtaatattaatcttgaccctcgtttaaaaaataatcctagtaaaaaaaccattcacgagttaacagctgaagctaagcaattattccgcctagtctacggcctagctgctactccatctggtcgtaacttatggatttcagggactgactaccaaaagagaaatggtgattcactgaacaactgctggtttattgccattcgtccacaaaaatacggtaatagccatatcgttcctgcttatcttacacaagatcaagtcgcaccatcgatgcctttttcatttttattcgaccaattaatgaaaggcggcggcgtaggcttttctgtagttgacgaaaacatcaaccaaattccaaagcttgatcaaaaagtagacttaactatcgtcattgacaagcaaagtaagtcctatgatgcatccctcaagttaggtgctactgatcttgatgaatggaaaaaagctaatcaagaaaaagaagattacatttactacaagctccctgatactcgcgaaggttgggtcttagcaaatgctcgtttaatcgatatgcattttaactcaactaatcctgagaagaagaaaaaaatggtacttgatatcagcgatatccgcccttatggagctaagattcatggattcggtggtacagcttccggcccaatgccactaattgaaatgctttttgatattaatcaaattcttaatgagcgtgctggtcaaaaattaactgcagttgacgcaactgatatttgcaacttaattggtaaaaccgtcgttgctggtaacgttagaagaagtgcagaactagcacttggttcaagcaataaccaagacttcattactatgaagcaagataaaaagaaactttaccaccaccgctgggcatcaaataatagtgttgcaattaattctgagtttgataactaccaaccaattgctgacagtattttacataacggtgaacctggtgttgttaacctggaattatcccgtaactacggacgcatcaaagatggctatcaagctggaattgatggtgaagttgaaggaactaacccttgtggagaaatttccttagctaacggtgaaccatgtaacttgtttgaagtctttccttttattgctcaaaaacaaggttgggatctgaaagaggcatttaaactcgctgctcgctacaccaagcgtgtcacctttagtccatatgactgggaagtttctcgtaagatcatcaacaaaaatcgccggattggtgtttcaatgtctggtattcaagattggattttatctacttttggccatcgcgtagtgactggatttaagactgctactgattcagaaactggtaaagaaattaaagatccagtttacgaccctgaaattattaaaacagtcgatggtctctaccaagctgttgttgacgctgacaaagattacagccaagaactaaactgcaatacttcaattaagcacactacagttaagccatctggtactgttgctaaacttgctggagtttctgaagggatgcatttccactattctggctacttaattcaacgcattcgcttccaagaaaccgatccccttcttccagcattaaaagattgcggctatagaactgagcctgatatttacaccccacatacaatctgcgttgaatttccaattaaagcagccaatgctgacagcgataacttcgcttctgctggaactgtttcaattgcggaacaatttgctactcaagctttcttacaaacttactggtcagataatgcggtaagctgtactattacttttcaaaatgatgaaagcgaccaaatagctccattactacatcaatatcgttatgcaattaaatctacttcacttctgccttactatggtggctccttaaaacaagctccaaaagagccaattagtaaggaaaaatatgagaaagcagataaccacattactggtaatgttgaaatagtttttgaacaaactaacgaagatcaaaaggggcttgaattagtggatcaaagcgattgtgataacggtgcttgcccaatcaagtaataagaggagtttctagaaatgaaaaacactaaaaagttaagtatttttgctacaattattttatttttcactttcagtctagctagctgtcaaaataatcaagaaaaagctaagccaaaaactgaccaaattacggttacttacacactaaaagataataaaaaggcttttgctaataaaaaggttcatcttaaaaagaattctactgtagctactggtcttaaaaagacctggaaaataaagagtcaaaaagaatttatcactgctattgatggtaaaagtcaaaatccccaaaagaagatctactggacttatacggtaaatggcaaaatggtaaacaaaagtgcctaccaacaaaagcttaagaacaaggataaggtagtcttcactcggagtaagtattaatggctaccgaagaactagctggaactaagaggctcgcgctcttaggcgttctgaccgccttatgcgttgttttgagaattttcaaaattattccggttcctaatgttcaacctgttacgacgattattatgcttactactctttttgtaagtggagggatgggatttgccctagctatcttaaccatgattatttctaatatttttcttggctttggcatttggacaattccgcaaattcttgcttacggtggttgcgttttaacaattctgctatttaaaaagctaactcccctaacgaaatggttctggctgcaattagctctggtcgcatttttaggaattgaatatggtattttagtagatttaggaatgacgattttcggtggtttaccagcctttattgcatactgggcaggtagtattttatttgatacctatcatgcaatcggcaatgttgttttttacttacttctatataaacctatctccttagcactgcagcacttctttgaggattaaatatgacacttaaaatttatactaaagttggcgaccaaggtaaaactaaacaagttagtggcaagatggtgccaaaatatgatttacaaattgaaactctgggcaatcttgatgaacttcaatcttacttaggcgtagtaatcgctaacttatcagataattgccaggttctaaaagatgaattacaaaaaaggcaaaaagaactctatcagttccaagctgatattgtcgttagacgacaccaagaaattactccagataaggtcaaagaattagaaaatagaattgataagattacacggcaatatcctaggattccagcttttatccttcctggtggctcaaccaccgctgccaatttgcagtatagccgcacattggcacggcgcgctgaacgttcactagttgaactaaatgataaaaagcagccaatttcgccttttaatctggaatatattaatcgtctatctgactatctcttcacgctagctcgctacgctaatgtcttagatggatatcaagaagtcaaaagcaaataaaaatgaactccgttagaataatgatatagtcctactttagtagacagtacaaatatataaagttgtactatctatgaaagtaggacttttttgtatgtctagaaaaagtaaatttagttatgaaatcaaacttaaagcaattaaaaaatatttaaatggtgaagcatccgtgctttcaattgcgaaacttataggagctgatgaatctacacttcgacattggatacatgcattcaaagctcaaggtccagaagctttaaaaccacataacaataatcagagatatagtaaagagttcaaattaaagtgtgtggctgcctatttaactggtaaaggatcatataattcacttacacataaattttgtctacgaagttctaatcaattaaagcaatgggttatcaagtataatagtcatcaagaacttaaggattacaatcctgctccggaggcttacatgactaagataaaaaagacaactctagaagaacgtaaacaaatagttgaatactgtaaggatcatgaatggaattataaagaagctgcacttaaatttggctgtagttatgctcaagtatataactggtctaagaaatatagagagcaagggtttaagagcttagaagacagacgtggccgtcatttaaaagtcactaaactatctgaaactcaaagactaaagcgtgaagtcgagcagcttaaaagagaaaataagctcaaagaccaacagatagccttcttaaaaaaagtgaaggaattagaaaggatgtgtttattggacaaccaaagcaaagacaaatagcacttaaacaaaagcagcgatactctctttatagcttgattaaagaatgtcatcaggaatatttgaatggatgtgtaaacaagctcatgttgcccgttcagcctactacaaatggcttaatcataagccaagtaagcgtgaagagcgagatcaaaagattcttaaacgcattaaagaaatagctaagagtaacaacagcctttttggatcccctaagatgactatggccttaaataaggaactagcggattgtgaaggtaaaatatatcgaagaactgtagctcgttatgtgtgttaacggcatctatactagtaagccaagatttcataaaacatatcactataaagcatctagacctgaagaaacttccgcaaatatattacatagagactttaatgccaataagcctaatgaaaaatggtgtactgatattactgaagaaaagattcctggaacaagtcaaaagatttatctctgcactatatttgatctttatgacagatttcctgcaagagctaaaagaacatggtatgtcacaatcaatgtcgagagtaagccgctgtattaataatggaccaatggaaggttggcaaggtttaatcaaagaaatgagagttgttctttatcctaatgtaaatagttatgaagatatggaagaagcttttaaagcaactattgaatactatattaattatgaccctcaagaacgtttcaatggtaaaactacaggccaagtaagacgagaagctaaggacaatccagaaaatataatttcatatccaataaagcaagataagagatataaaaacttttggaagaagatcgatgaaaagaaaaatcagctcgcataatagcgagctgattaagctaattaatttatatattttaactgtctacttgacacggtacggatcatactgagccaggggcttttgaattaaattacaaatttcttaagtgcttttgcaataccattatgatcattatcatctgtaacaaaatcagctttttctttaatatcttcaattgcattacccatcgcaattttcttaaagctgggattttcaaacattgagacatcattaccttgatcaccaaagaccatgacgtcttctggactaatctttaaccgctctgctaggttcatcaaggcattgccctttgaagctccaatgccatttaattcaatacaattatctaagctgcgaacaatatcgtaagattcaaaggcccagtaaggaatagaattccaaagtttttcaatttgatcgctaccttttggacaagtaaagcctactttattgaaggtaaaatcttgcggaatctcttttcgttcacgaactctaatttcattatcagtcaaagctgcattaatttgcatttgcactgacagatcacggtctaaggtccagaaacgttcagtcgtttcaaaatgtaaatttacatgggcaagacgttgcagacgaagcattacttcaaaatcacgatagtccatctcctgactcattaaaacttttccagacaagtcttgaacaacagcaccgttaaaaacgactgcgtattcttttgatccttcaagtcccaactgcgtttcaaatggcatcacgccagaaagaggacgtcctgaagcaagaaccactttaatccccataccatgcgctacttgcaaagttcttaaagtctcaggtgaaattgcgttaccactattgagcaaagttccgtctaagtctactgcaactaatttaatcgccatacatactcctatctaccaaatattaaatagaaaattacatttaacaacaatcctagcagggcgtagcaagcagccgcttccgctttgattttctctttctttactaaatataccaaactagcaatgaaccctattaaaggaaaaacaacataaaaaatcattgcccattcagtaattccattaatatctgtatttaaatgatgaacaagattcttcatttttctcctcctacaaaaaatagagactaataaattattagtctctattttatattaaccaacataaaattcaatatgctgcttcagattttcaaaatcaattggtagatgaccaccaatttcaccatctaaattaacgggaattggttctttgtctttactgtcatctagtaattctacttttaagtatctagtcttagtatagataatttgcggatcattaacatgatttccatttaaggccatcgccattaaccgtaaaacatctaccggatttgcagttttaaccacgattaattggaacaaaccatcggataattgtgcatcaggcataatacgctcaaaaccaccgattgaattagtcattcccaaaagaaacattgataagtttccttcatagacaccatcatcataggttaaacgcatcttgttactgcttatttttggtaacatttctgctccctttaagaggtatgcactatagcctaataccgacttcacttctgaagggacgccataagttaattcagtcaatgaaccactagccgcaatgttcataaaatattgcttaccagcacgtccaatgtccatcttttgcgttttacctgtcaaaatcactttagcggcatcgactaaattatctcttggaatttttaaagctcgagcaaaatcattcgttgttcctgctggaataacagctagtctaggtcttttttctaggggagccacaccattaactacttcgttaatcgttccgtctccaccagcacctactatcaaatcaaaaccagctagggcgcatcttttggcttcattttgagcagacaaaggttctggcgtagttctaaaggcactagcttcaaacccagcctgttctaatacgtttaaaatatctgcaacattttgaagcatttgctcgtgacctgatacaggattataaattaatcttgcttttttcgtcatcgcctttcgcctccctaaaatgattaacggctttgaagttccttattaagcaattgattaacaaccttagggttagccttaccacgagtttgcttcatgatttgaccaactaaaaatccaattgcacgatccttaccattcttgaagtcttcaacagattgtagattatcatcaacaaccttagttaccataggcccaagaacagaaacatctgataattgaaccatacccttgtcttcaacgtacttcttaggatcagttccattttcaatagattccttgaagactttcttagcaatcttggatgaaatagtaccatctttgatcatcttgatcatttcagctaagtgttctggagtcaacttaatatctgcaataccaacttggttttcattcaagtaaccattaacttgagtattcaaccagttagcagctaaagttggatcagcaccagcagctactgcagcatcgtagaaatcacttgattccttagtttgcaaaataacgtcagcatcgtattccttaataccatattcttcaacgtagcgcttgcgacgttcaaatggtgattcaggtaagctttctgcaatttcatcgatccagctttgcttaatgtggtaaggtgcaatatctggttctgggaagtaacggtaatctgcatcgccttccttaacacgctctaagacagtcttaccagtagcttcatcaaaacgacgagtggaaagttgaactctaccaccagaaagaagtacttgttgttgacgcttctcttcataagcaagagaacgacgaacgtggtcaaatgagttcaagttcttcatttcaaccttagtaccaagcttttcttgaccagcaggacggatagaaatgttggtatcaacacgcattgaaccttcttccatcttaacgtcagatgcaccagtaaattgaacgatctgacgtaatttagtcaagtatgcgtaagcttcttctggatcttccatatcaggttcagaaacaacttcaagaagtggaacaccctgacggtttaagtcaacgtatgaataaccattagctccgtgagtgttcttaccagcatcttcttcgatgtgcatttcgtgaataccaatgcgcttcttcttgccgcgaacttcaacttcaatgtaaccatcgcgagcaagtggttggaagaattgagtaatttggtaagccttagggttatctgggtagaaatagttcttacggtcaaaatgagttacaggcaaaatatgtgaatgagttgccaaggcaaccatgataccaagacgataaacatctttattcaaacgaggtaagacaccaggcattgcccagtcaataacattagtttcagtgtttgcttcagcaccataagtaactggtgatggagaaaaaatcttactctttgtttttaattcgaagtggacttctagaccaatagtcgatttaaaattcattaattaatcctccattcctgtaggtgttttttcgtagaatttgttattacgttcaatgaaatcagcaaccttaaatacagtaccttcatcaaaacgtttagccataatttgaagaccagcaggcattccatcaactaaacctgcaggtacgcttgcggctggaataccagctaagttagctgaaatggttaagatatcgttgttgtacatcttaattgggtctgaaatttcttcaccaataccaaatgctggttcagtagtagttggtccaacaataacatcattttcttcaaaaattttctcaaagtcacggcaaattaatgttctaacttgagcagccttcttgaagaattcgtcatatgcacctgctgataaagcaaatgaacctagcataatacgacgcttaacttcgtcgccaaaaccttcacttctagatttaacgtaaacgtctaataagttcttcgtatcctttgcacggtagccataacgaataccatcgtatctttgaaggtttgaagaagcttcactagaggcaacaatgtagtaagtaggaacaacatacttagtatgtggcaaagaaacttcgttaataactgcaccagcgtccttcaagacatcaatttgcttttggatagcatcacgcatttcgccatccacagcatccatgtattccttaggaacagctacgcgtaaacctttaacatcttgacctaggaagctagtaaaatcaggtacttctttttctgaaacagttgcgtcatgttcatcaggaccagcaattacgtttaatacctctgctgaatccttaacacgtttactcataacaccgatttggtctaatgaagaaccaaaggcgatcaagccccaacgtgatacgcgaccataagttggtttaataccaaaaataccgttaaaagcagctggttgacgaatagaaccaccagtatcagaaccaagagctgctacaacttcaccactagcaactgcagctgcagaaccaccagatgaaccaccaggaactttttctaagtcccatggattacgagttgcaccgtagtaagaatgttcagtagatgaacccattgcaaattcatccatgttagtcttaccaacaaaagttgcttgagccttctttaacttgctaattacagttgcatcataaactggcatgtaattgtaaagaatatgactagctgcagtagtcttcataccattagtaatgatattgtccttgattgcaattgggataccagccaatttatttttagcaaaatctaaattttctgctggctttgcatcatcgtcaacagtaatccaggcattaatctttttgtctgtttctttaatatttttaactgtttccttagctaagtcttcagctgttatttcgccatcttgtaattttttatttaatgagtcaatgttttcatttaagtaattcattattcattatcatccttatcaataattactggcaccttaatgaagccatcagctttttcaggaacattcttcattaattctgcgcgactttcccaatgttcaggcttgtcttctctaaaatcagtctctcgatcaacaacttgaacagtttcaggaactccttcagtatcaacttcggctaattgatgtgccatattgataatgtcacccatttgttcagtaaacttatcaatttcgtcttcaccaaactcaagtcgagatagtgttgcaacgtgattgatttcatcttttgtaattttcaccgtttgcctcctattcaccgccaaagacgtggacataataactatcgtctgcggaattcttagcgattaatgcctgtgtatcattaacagaattaatcttaatttctattggtgcatctttaggtaagtacttcttagcagctgagagcacaagtcttgagaaactctcgatctgtgcatagccaaagaattgcgtagttacagtaatgttcatctgcgtcaaggtcttattttgataacgaacagttgctgttaccccactaatattagggaaatatccttgaatagcagccttaaaatcactaaatgaagctgcatcagtagaattaattgctttttcacttccaacagtcggtagcacttgactacgattattgactgttttccaatcatttattttactactatttgcattagcaattccatatgcaaagtaatttccacctacaagggaatctttactggtcttactaaatagtccaactagaattgggatatcctttaatcccttctttttacgtaagtaagaaactagcttgttagctgcttccttaccaaaagtttcctgctctgcacgagaaatatccttatgatattgtggaccatctttaactttttgatagtaatcaactgagttaagggctaaacctacactcataccacccattttgtaactagaattagatttagtcaaaaaatcttgttccaaaatttggtctaaaatgatcggattataagaatcttttttggtactcttttctgcatttaaaccatctgcattgctcttagactttcttcctagccaatcggtcgcatctgctacagaaattttttgtccttcttggaagacatacttactacttgaaaaagtattttgagataagtttattaatccagattctaaagcacgaccatcaacattattatcgctagtattttcagttgtaccttcgataggactagttacatattcaccatcttttaaaagaacattataaccattcttatttgtactagtcgtttgatagctcttcttcttggttgttgaagttgtgggattattggcaagatcagaattttttaaattgccacatgcacttaaactcaaaccagttgctactagcagtgctatttgcaaaaatcttttcaatttatttttccttcttaattctttatttttcaatttttacaattgcttcttgttcagttaacattggaacttgaagtttttcagccttatctttcttagaaccggcatctgcaccataaattaaatagtctgtcttcttagatactgatccagttactttagctccaagatcttgcagtttcttagtaaattcacttcgagtaaagtctgataattttccagttagaacaacagtcttttctttaaagaaattatctggtgcttcttcttcaacagttcctaaatattccatatttaatccactgtcgcgcaactcttgcaacaacttttgcgcacttggctgattaaaatatgctgttaacgattccgcaatcgtctctcctattgtatcgatacttgttaattctggcactgttaattgactaaccttttctaaatttttatatttttccaaaattaatctagcagctttagcaccgacatgatcaattccaagaccaaatagtaataattcagctgaattttgcttactattctcaattgatgttaacaaattagtaattgacttatctttaaaatgatctaattgacttaattgctcattacttaaatgatacaagtcggctacatcattgacaaaattcttatcaattaactgttttacgattcgcggacctagtcccatgatgttcatcgcaccgcgtgaagcaaagtggataattccttcttcaacttgtgctggacacattggattgatgcagcgaagtgctacttcgtcttgtaagtgaaccaagtcttgcccacaagatggacatttattaggaatctgataaggctcgctatctttaggtcttttatttaaaacgacactagaaatttctggaataatatcgccagccttgtgcaatttaactgtgtcaccaatccgtactcccttttctcttaagtaatcaggattgtgcaaagaagcgcgtgaaacaacagtaccagcgagttgaacaggatccattaccgcagttggcgttactactccagttcgaccaactgtccactcaatctctttgactaccgtttcttgttcttcaggaggaaacttataggcaatttcccagcgcggtactttgacggtatttcctaattcattttgtaagctcaaatcgtcaacttttaaaacaattccatcaataccatagcttagatcgttacgcttagcagtatattcatcaataaacttaaatacttcatccattgattccagacgccggccagtttgattggtgtgaaaacctaagcgattcatttcatcaattgcctggtgctgactagtaatgttttttggtggattaacccaagtataaataaaagtactcaagtttctctttttagtaatccgcgcatctaattgccttaaagaaccagcagcagcatttctaggattagcaaatacctgctcccctttttcatcacgctccgcatttaatttagcaaatgcttctttttccatgtagcattcaccgcgaacctcagttgttaaaggctcaggcaaagtttggggaatatccttaataaacttagcattagctgtcacatcttcaccaacacggccatttcctctagtagatgcacgtgttaatttcccagctgtatattctaacgacaaagataagccatcaatttttaattcaacgttgtaagccacaggatgaccaactagctttgtaattctttcatcaaattctttgagctcatcttttgagaaaacatcccccattgaaagcattggaatgggatgttccaccttagaaaggtcactcttgatctcaccaccaactcgctgcgtaattgagtcagatgttactaggtcaggaaactgcttttctaattctactagttcttgataagccttgtcataaaccgcatcttcaactactggtgcgtcttttgcgtaataatcttctgcccattcatcgagcttttttcttaattcatcgactttctgagaagcctgattgtgagttaaaactgccattatctcagtccttatctaaatcaaactactttaatctcattatatctttttaattggtgcaaaggcagctaaaaggcgctttactccttgactagcaaaagcaatatctaattccatatcttctccgctgccgttaactttgacgacaacgccttttccccaggccttatgagaaacttgatcgccaacattccaagacttcttgtccgcaccaactgcaccgctagccttcttagcagtttcaattctagtttttggacggtaaacttgagaagttgcacgttcactacttttagcaaaaggaatcgacattgcagaattagactgaactgggttaacaaattctagatccttatcttcaatttcatcaataaagcgagatggctggttattttgcggacggccgtacatcgttctagaaaaggcattcgtgatgtaaagtttcttttcagcacgggtaatacctacataggctaaacgacgttcttcttcaagttcacttggatcgcctgtagctcttgaaagcgggaaaagtccttcttccatgccaactaaaaagacaactggaaactctaatcctttagctgcatgaagcgtcattaaagctacctgattatcttgattttctaaatcatcttgatcgcttaaaagtgaaatttctgaaagaaaatcgcctaaggcagtcgaatcttcatcttctggctcataattatcatcaaaacgcttagtaacggttaagaattcgttcaagttttctaatctagtatcggcttcaattgtatgttcattctctaaagcttctttatagccaaagtcagctagtaatttttcagttaaaccagttacgctatgcgtcttactgtattcaattgcatcctttaaagcagtcccaaaagttgctaaagtcttagccggacgacctgtaattggtgctaagcttaagttcttaaatgtttcttcaactgtgaagtcattatcattagcaaagccgttaaatttagccatcgttgttggccctaatccacgcttaggcacattaataattcgattaaagctcatcgaatcagcagggtttgctacaacctttaaataggccaagatatctttaatttcttttcgatcatagaatttatgaccgccaacaattcggtaaggaatgtttgatttaactaaagcttcttcgacgttacgagattgagcatttgtgcggtaaagaaccgcaaaatccttgtagtctctgtgatgctcttttatttcttcgttgatctttgaaacaataaagagtgcttcatcgttaccactttgagcacgataatagttgatcttatcaccatcgcccttatcagtccaaagctttttaggcttacgattttgattattcttaataactgaattagcagcatctaagatatgaccagtcgaacgataattttgttcaagtttaatcgtattaacttcatcatcttgatagtcatgctcaaaattaagaatattttccatattagctccgcgccaaccatagattgactggtccgcatccccaacaacacaaatattcttatactgagcagctagtgccacacaaagttgatattgagcttcatttgtatcctgatactcatcaactaaaatatagcggaacttattttggtaataatgaagcgtttctttatctttcttaaacaagactagcgtttgcataatcaagtcatcaaaatccataatttgatcacgctttaagcggtgctgatattccgcataaacttgcgctgttaccttttcaaagggactagttgcttgcgctttgaaatctttgggtgtaagtaaatcatttttaccattagaaatagcacctaaaattgctttgggatcatacattttaggattaatattaagatctttttcaattcgcttaattaaagttaactgttccgccgaatcagcaattgaaaagttattagaataaccgatcttttctgcatcacggcgtaaaattctcacgcataaggcgtgaaaagttgacatccaaacactatcagcagctggccctaaaagtttttggacacgttctttcatttcagttgcagccttattggtaaaagtaatggctaagacattccatggcgcaacgcccttttcttcaattaaataggcaattcgacgtgttaaaactgatgtttttccactaccagctccagcaactactaaaagtggaccctcagtacactgcacagcttttttttgctgcggatttaatcctgcaagaattgtttcttcgctcattgcttctctctttcctgataacctaaacactaaaatagacttgtctattataacaaaaaacgacgatagcttttaccttaactatcatcgttttagaattaatcatattgcgttaaattgaactctttaattaaatcaattagctttttggcataacctggatcagtcgcataaccatctgtttctaaagcttgcgcttgacttatataatccttagcagctaaaacatgctgatattgatttgtattccagctagttccattcacaaatagccgcgtatgtgcctgaatagattcttcatatgaattataaacttgaaagcggccagttacagtttcccagtgatcattaacaaactctgaagtcgtcaactcccgactagtattaggatcagttcccttgacgccaaacaaattatagtatttttttgaaagttcgctttgaccaaaattactttctaagcatgcttgcgcaatagtaacacttggaaataaaccataaggcttatctgctctttgagcaatcggagctactattttaataaacctttctttactttgaagagcacgttccttttctaattgcgcttgccttaattgttcattaactgcgacctcgtgacgccagtacaaaaagcctgataaaattactaccaaagtaaagcaaatagcaaaagctcttgcaattacatattgaatatttttttgacggcgtctacgcggcattttaactcatcttccctttcattacttgcttcaaaggcattgcaattgctggagtaaggatagcagtaaagattgcttctacaacaccattaacacctaaaacacttaataatattgcaattaaaggagctgaattttgagtttgacctaagctttgaagtaaagcagctggattattcataaaccataaactagtaatactaatcaccaataaagtattagcaagtgacgtacataagccagcaattgtataaacaactgtcttttgaagttttgattcatctcttgcagcttgaccgatcattccagcaataaagccagctgctgcacgtggaattaaagcaataaagatatttcggaacagcaacatgctgacaatatcgccaggttgcgtataagcgacaaataaacttaataaaccccaaaataaaccaatcgacgtaccaaaaccaggccccattaagcaaccagctaaagcaacagttaggggaatagttgtaattgaaggtaatcccggtaagattctaatgtagccaatgtaaggaacaaaagtttgaaccaaaataattgcaacaaaaatagcactaatggcaattctaaaagtctttttattaatcatagtctttcctagctttatcaagtataactttaacaaaaaaggaagccgcatttgcgacttccttttcttagtggtgcgggcgagaagactcgaacttccacgatctaaaagcgatcacaagatccttagtcttgcgcgtctgccattccgccacgcccgcggtacttaactaatataccaaataatttttcttttagcaaatggaaattttattttttacttatttcttctaactaatttcagtcttccaccgcatttgccgcagcgatatcttcttgtgtttactttacaaacacgaggatattgaaaatggcagtcttcgcattcataaagatagtttttaacttgtttgcgtcttaaaccaatatcaggcgtataacgactaccaccaacctgagctaataaattcttaaaatcacgattgcgatgctgatagccaagccctgccaagtgtaaatgataatgcgtcaactcatgcttaattattcccactaagtctgaacgatatttttcatctaaaaaatgaccattaatatcaatgtgatggtcattgaggaaatatctacctccagttgttgtcatgcgattattaatcttaacttcatgcctgaaaggaaggtgaaaatattttaatgaaatttcttctactaatttttgtaagtctgcttgattcattattttcgaattaatttttgatataaacttgcctgtcttggagaggatatccttctctttagaccgatcacaattttttgctttactgattgctgcccatctatccaagtaccagtgaacaagtgaattgaatacgagtctttacttggattgcataaaaagccatctgggtaaacatgaatcccgtcctttaaaagctgttcgctattacctatttttaagccgtatttttcttttaaaatatcagttacagacaaactattcacaccagccatttgattattttcatcaaaagtaaactctttgtcttgataataatcaagaatgtcttttataaatgggtgatgcgcttctgcgccaaaaatagcagctgacaagtagtcattattttcaaagccaataaacgcctgattctttaaaagtggatctaacttcttaagaactctaacatccgtatctaaataaattccgccttgttcataaatcgcacgagcacgaatataatcagacacaaaggcccattttttagcttgataagcttcttcaagataacgattttcatgcatatcaaaattatcttcattccactcaataatttcatagtccggcaacttctttttccaagtcgcaagacactctttaattagtggcgacttagggttgcctcctacccagacgtaatgaatttttttaggaatcatctttttacctttctaagaaagcgggttataaaatccatgatatcttgattaaaatcaagtttcatcataaacataattccagcataaataattaacattaaaattgacttaatagtcatatttacaaagctcgacctaattaaattaggcatgagcatccctgcaattaacgtaattattccaatcaagaagtactttggcacgtcgctaaacgcatttttaaaactgtaatcatctctcacgatccaaagccgcaaaattagcactacaaactccgtaattaaaattgccactgttgctccgctggctccatatggtcgatcaagtagcgctgctaagacaacttcgataattgctccaatcacaactggaatcgcatattctttgtctctcctgttagctagtgcaaactgattagcaaatactccacccatcggaatcataatgattgttaatgcaaagaagaacatcaaaggcgtcattgggataaacttcttaccaaagaagaatgggacaaattgcttggtattagccataataatgactgcaaataaggttccaagcatcgttgttgcttccagtgacttctttaagacaactttctgcgtttctttttcttcactagccatcttcggcatgataactaaagaaatactagtaattactcccaagatcatattagaaattcgctgcgaattatcataaaaggccacctgcgttgaattactaaaaaagcccaaaattggtttatcaagcgacgtataaatttgcgtcgctatctgcggaatcatcaaggtaatgattgaaacaatggtggtcttatatttataaaaatggccaactggtttgcctacatagcgatgaatatcaagccaaaagacaaaagatcccagcattgtcgaaactgacatgattaaaaagtatttccaaagatcagctggtgacttaattaataataaaatcaaaactacactagccaacttaacggcagtattttttagcactactcgaccaaaatcagctagtccctggaaaaaccaagaaatatcaacttgagccgagatcaaatatggaaccattaagattaagtagttccagtattgaatatgaaaaatgttggtaattagtaaagtaattaaaatagtcactaaaccagcaattgcttgaaaataccataaaccccagaaagcttctgttaactcttggggcgtaccataagttctagttcgagaaacagttcgaattccaatgtaagaaattgacaaagtacaaaataccatcagaaattgtactgtattatttacactgccataaataccataagtcttaggtcctaaaacccgagataaatatggaactgtaattaacggtactaaaactaaaaagatctgatagaccgcattatataaaatattaagaaaagttcgcttcactactttttcctctaaaacttctttgtcatgtaattaaagataggttcgcaagaattaagattgtcaacttcatcaattaactcacgccaataaaaacgttgctctttatattgatgatcgtcaggatgccttaaaacttgcagaagttctttttgtgaattaacacatggaccgggtgtaacatcctcgtatggactcaatagtaaaccacgtactttttcgtactgctttaaataattagtaataaaaataattggcttatctaagtacaagtaatcaaaataaattgatgaaaagtctgtaattaggaaatctgtatttccgagtagttcatataagtcgagatcgtttttaaataaataatcattatttaagaaggcgatgtttgaaaactgactgttaaaatcctcgaacatccgcatttcataaggatgaagcttcacaattaaatactgatgctttgcttttaaagcatcatttaattcataaggatcaaaatcttgaaaagcaaaataattatattttcttatctgctccataacaaacggatcttctaactcataacgaaaagttggcatgtaaattccgatatgtgcttgatcatccctagtcttaaataaatctgctagtaattcttctttagagattgctggatgattaatgtaatcaattctaggaaagcccagtttttgatattttttaccttcaattgccatgcaagcgctcattaagctttcgtagaggtcagagcttgaagttaccatatctgcatttttatgccatagcttttgattacgcttattatctcgatagcgcgtattatgcgccataaagcccattcgcttcaatggcacgccatgccagaattgaatattaacttgatctcgtcgtgctttaaaaggctgatgtgtagtaattacatatttagctgcaccaattttcttccaagtttcccatgataagtgagaagatggccaaggttcaactaaggtaatgttgtaatcaggatgattggtcttaatatttttataaaataaatagccgtttgagccagatctacctgagccatttaaaactacaatattcttttctttaattggtcgaagacttgcaaggaagttcattccccataagtacaagcgaaaaaataaacttttcatttagatgttcctcagtaaatggataaacatttgtatatacgtcttattgttcattattaagggtataaaaaaagcttgagtaaactcaagctttttttgattatttgacaaaactttattttcttttcttctactattccatttcattttatttctatattttccatttaaagtttcatataattcataactagatagacctttatagattggagattacaatatgatcgaaatctcgataaagcaaaggaaatctatactcaaattaatacatctaatgatgatttacttaaattacaagctcaacttattctcaatactctacaatcaggtcgtcataaatttcctaaaaacaaagataaaattatacaaaaagtcttttcaggtactcattggctcaatgattctcacaaaattctgatattagctacctttattgaagttcttgatccctttgacttacctttctttttaaatcaaatttatcagaaatatcaaaacaaccttggtaaacaaactctaaaaattcaagaaagcgttgcatctttctgtatcaactatttatattcagcatcccaaaacagaaatattggttcaactaataaagctattcaactattaactcaattaacagaatatcccgaattaggtattgagaaaattataggttattactatcattgttactttacaaatcaaaaagaacaattaaagaccattattactattttaaagaaaagtaacttaagtaaaacaataaatatcttgccacaataaactgcatatacgcaactcgctgatcaattatgcaaaaaaaatcctcttcattacgcaaataccttatcatttatctcatcttaaatgaaaagaggagtaacaatgaaaaagtttatcaacaaaaaattttttgccttaagcatcttgctttcatgcttgagtggcttagaattgccttttggaacttggtcatattcagaaatattctctttaattactgaaaaaaatattcctaatactatcaggatggtagcagttattactattgcccaaattcttttggtcattattaagtatttgaatacgcggatacttaacagaaatatcgcttgttttaatcaaaacgtgcgtgaatttctaatgaaaagcaactttattgaaatcagtgaaaacaatgtatcaaagcaaatttcttttctttcaaatgatcttaacttaatagaagagaactatttgaagcaactttttcaattaatttcaatgattgtaacaattgtcggtacttcaatagttgcagttggcaatagttttttattaactttagtttttatttcattcgctattttttcaagtattatccctaagttttttagcaaaaaaacagctcaacaatcaaataattggagtacttctactggaacttacataacatttatgtccgattttttaaagaatattaggacagttttaaattacaatgcattagatacctttattaaaaaagggcaaaaaattattactcaatctactgaaaataagagattacgtgataatacaattgctaaaagcaatttttgggttaatatattcgtttattcttttgattttttacctattggaataggaataattatggtcatcaaagggatgcttactctagcttcatttgtagctgtccaatactccagtacttggattattaacagtttttacagtattaatagctgccgtaatcaaatgtcatcagccaaacctatgatagataagctactttcttttaaaccagaagaatttgacaaaaatattcctaattctaacctaaataccttaacccttaacaatattagctttggatataagccaggagaattagtactagacaaaatcaacttaaaaattaaaagaggtgataaattattacttactggtaagtctggtcaaggaaagtctactcttcttaatcttttaactggtcaactaaaacctactaaaggaaacgtgctcgtcaatgggatgaccaatcaaaattatacatttagtgaggtacaacagacttctcaaatatttaatgatactttacttttcaacctaacattaggtaaaaagttgaaactgtcaaattttttgtgtaaatagatctttctcgtaaattgtttttttaacgttttatttattcaaaataggattctaaggtatcctggacttgaccaaagcctttgtgaattcggttgaagtagcggtcattgtagctcattgcttggatgccaataaaagtatcaagcgactgttcagtcgggaactccgctttaggcttagccttgcgcttaatgacgttattaaaggattcgatcatgttggtagagtaaattgaagccctgatctgcttaggataattataaaaaacaagcaggtctggctcgatgtctttcaggtttctaatgacacgattgtagctcttgttccatttggcataaaaagcatgcaatacatcaacagcagccgctttattggcttgctggtgaatctgcttgaattcgttcatgattgcctcgcgatcgtccacgcgtactttagcgcagatgttgcgcataacatggaccaagcagcgttggaaatgagcttgaggataggtctttgccagtgctgctttcatgccgacaacgccatctgaaaggaaaagctctacttgctttaaaccacgagatttcatgttctggagcaacgccgtccagacttcaatattctcactaggcgcaatgcagtagtcgataacttccttgtgaccattaggcttgatgccaatggcaatatatactgcttctcgttcaaaagtttctcgacgcaacggtatatacgttgtatcaagataaacacaaaagaacttatcgctcagcttacgcttgtgataagcctcaactttaggaatcatttgcttagagatattagacacttgagctggactataatgactgccatacattttttcgatcaaattagctatttctctagtggttacacctttagaataaagctttataaccatatcttctaagagatcagtatgttgtttatagtctggcagagtgtgttgatgaaacataccattgcgatctcgtggcacttgtacctcaattgatccaaactgggtatcaattttacggaaatacgcaccatttctagaattaccagtattccagccatttctagcatagggatcatatcctaaaaaggcagtcagttcagattctaacatgtcattaacagcttgttggatttcatgacgaagcaaatcattaattttatcttgattgaatagagcttgagttatatttttggtaaaatcattcatgaaggagttcttctttctgtatgtttttttgttcaaaccaatcatacgagaaaggaactcctttttctaatgttttaggaaattaaattaaggaataattcatccttacacaaactattttacggtctcaaaaagtttgatgatttcaaaattacagaagctatcaaaaaggctggactattgccatatgttaatcggtatggcttaaatacgattatagaagaaaatggaaataacttatctggcggtgaaaagaaacgaatagaattggcacgagcttttctatatgaaagagattttttaattgttgacgaagggacagcttcgcttgatcccaccacagctaatcaaattcatgaagtgttcttagattctccattaacagtaattgaaatagatcatcatattccacctaaaattatgcaaatgtttaatcatcattacgaattgcaaaacaagaaattagaacgtatattttagtttataaaaaatgtagctagaaaatttaaactagctacatttttacatacatattttttatttacacttagaaaataatatttattattttctagcagtacgtctttcaaagaacttaacaatttcaacaatgataatcatcaaaagtcctgcaataattacaaccaaccattgcatcccatctaattcagtcacatcaaaaatcttagttaaaaacggaatttccactgcagccataactaaagcagaaataataattgctccgttgaaccacttattttcaaatgtttgtcctctaaagattgacttgtgaataaatttagagttaaaggcatggaacaattgaattaagcctaaagtaaggaaggccatagttaaagcatctgcatgttgcatagctgcgtttccaacgtgaggtccgacatgtaaaccaaactgatatgcacctaaaactaaaataccttctaaaataccttgataaataatcgaacttgcaacaccgccgctaaagaagtttgattttctaccacgcggcttcttcttcataattcctggctctactggttcaacacccaaggcaattgctggtaaggtatcagtaaccaagttaatccacaacaattgcactggcattagaatatcccaaccaagcattgtcatcatgaagactgttaaaacttcaccaatgttacaactcattaggtaaagaattgccttttgaatattcgcaaatactttacggccttgcttaattgcttcaacaattgttgcaaagttatcatcagctaataccatatcagctgcaccttttgatacttcagtacctgtaattcccatgccaataccaatgtcagcttgctttaaactaggtgcatcatttacaccatccccagtcattgcaacgatcttattatttgcctgccaagctttaacaattctaaccttgttttcaggagatacacgagcataaacgctgtagtcttgaacgtgcttgttaaaataatcatctgacaacttatcaagttcagcacctgtaattacggacttatctttgtctgaacctgcttctaatatacctaaacgagaagcaattgcagcagcagtgatttggtggtcaccagtaatcataactgttctaataccagcgctcttggcttctgcgacagcggctttagcctctggtctttctggatcaatcattccgactaaaccagcaaaaattaaatcttgctcaacgttattagtagttggatcgtcataagccttatccacaaccttgtaagccagtcccaaaacacgcaaggcttgttcagccatattcttgttagaagctaagatgttttccttttcactgtcagaaattggtgttacttgaccctttttttcgatcttagttacacgttttaataattcgtcaggggcaccctttacagcaacaaagaatttatcaccataatggttaaccgtcgacattaattttctctctgaatcaaaaggaacttcttgaacacggctatctttcttaagtaaatcttcaactttgacattttgatcaaaggcatattgaatcaaagctgtttcagttggatctcctaaaagccgtccaccatcttcaattttagtgtcgttagccaaaatcatggccatcatagctggattatctaccttaactgcctcttcatcattatgaagttcaccatcatagtaaactttttcaacagtcatttgattttgcgttaaagtaccggttttatcagaacaaataatatctgttgcacctaaagtttcaacagcaggtagctttctaacaatcgccctatgcttagccatcgtttgcgtaccaagagctaaaataatcgttacaattgccggtaaaccttctggaattgcagcaacagctaaggaaacagcaactaagaacatgtcaataattaacttattatttggctcgcttccttgcttggtaaacatccccacaacaaagacaattacacaaattgctaaaatcatgatggttaatgtcttaccaagttgatttaagttttcctttaatggagtagctgtttcatcggcattgtttaacattgtcgcaattttaccgacttcagtcttcattccagttccaactacaataccttctgctcgaccataagttacattagtattggcataagccatattaacgcggtcacctaaagctacatcatcagcttttaagatgtcgctatctttttcaaccggaactgattcaccagtcaaagcagactcttcaacctttaaactagctgtcttagctaaacgcatatcagcaggaacaacgtctcctgcttcaagtagcacaacatcacccggcacaatgtccgtacttggaatttctaaaattgcgcctccgcgccttacatgagcattcggcgtcgacatttctttcaaagcatcaattgccgcttctgatctagcttcttgaatcacgcctaaaattgcatttaacaaaacaacaatcataataattgctgcatcagtccactcattagctacaactcctgacaagactgcagctacaatcaagacaatgatcatgaaatccttaaattgatcgataaagcgcatgaacatactgcgctttttctttgatgctaaagaattaggaccttcagttgctaatcgcttcttagcctcatcatcagtcaaaccattatctaatgatgtgttcaattctttctctatttgagaaatatcttgagcatagtacttttctttcaaagccaatcccccccaataactaaaaaagacttatgaccagttatcagtcataagtctcactaattaagataagtccagagatatccatctcggttgttgaacttatcgcaataacttgccgttactctcttatgcagttttattatattaaactaacgagtccgatacaagtttagttctttttataaaaatcatcaaaaacagttactggcaagtgacgcttgtgctcactcttcttccataacttttcaatttgctcagcagctttttcgcttacttctttaccttctaagtagtcatcaacttccttgtaagttacgcctaaagctacctcatctggtaaatctggcttttcttcttctaagtcagcagtaggtgccttttcatacaaatgctttggacaaccaagttctttaagcattgcctttccttggcgcttgtctaaacggaaaagaggagtaagatctgctgcaccatcgccgtacttagtgtaaaaaccagagaaattctctgcagcatggtcagttcctacaactgcaccattatttgcaccagcaattgcatattgcacaaccattctttgacgagccttaatatttcccttattaaaatcagtaatcttttgaccagttgcttcaaccacttttaccatagcatcaactggatctttaatatttacgattagatcctgatcaggcttttgaaaggcaattgcatccgcagcgtcacttgcatcagcttgaacgccataaggaagacgaacagcgataaattgataagaatcatcaccagtctcttcacgcatttcttcaattgccatttggcaaagcttaccagttaaggttgaatcttgaccaccggaaattcccaaaacataactctttaaaaatgggttttcttttaaataatcttttagaaaatcaattgatttacgaatttccttttggggatcaatttctggtaatacatgttcataagcaataattttttcttgtaatggacgcattctaatatcctcttttcacaattcggctgcgaatatcattgatcaagtttaccttgttgtcatataacttttgtgataaatcaactgggtagtcttgtgggttcaaactacgcttgtattcatcccataagccatccaagttatttgcggcaaattctttcgtttctttaagagtaggttcttgataaactaattttccttcatggaaaatttcatgtaacaaaggacgagctgtatagtctgtaacaaccttattgatgtaagtgtattgagggtggaacatgaaaagagcatcgaattttcttgggtcttcatcgtagcgtgatacccagtcaccttcatttttcttttcagaattagcttggattctccaaacttgctttttacctggagtagataccttttcagcatttgaagaaattttcaaagtgtcccgcatattgccatctttatcttcaatagcaactagcttgtatacaccacctagagccggttggtcaaaagcagtaattaatttagtaccaattccccaaacgtcaatttttgcaccttgcatcttaaggttttggatagtcttttcatctaggtcatttgaagcatagatctttgcatcagggaagccagcatcatctaattgcttgcgcacttttttagaaatatatgccatatcccctgagtcaatacgaacaccttggaagttaatcttgtcgcccatttctttagcaactttaatagcagttggaaccccgcttcttaaggtatcgtaagtatccactaagaatacacaatctttgtgtgtttccgcatatgccttaaaagcatcgtattcgttattaaaggcttcaactaaagagtgagcgtgagtaccagcaacaggaataccaaataattttcctgctctcacattactagtagcatcaaaaccaccaatatatgctgcacgagttccccaaatggctgcatcagtttcttgagcacgacgtgaaccaaattccattaaaccatcattaccgactgcaaccttaattctagctgccttagtcgcaattaaagtttggaaattaataatgttcaaaattgcagtttcaactaattgagcttgtgccaatggtccttcaatttgcatgattggttcattagcaaaaaccaattcaccttctcgagcactacgaatagttagttttaattttagattacgtagatagtcaataaattcatcatcataaccacaagtttccttaagatattttaagtcgctttctttaaaatggaggttatttaagtattgaataacatggcttaaaccagcattaactgcgtagccgttaccaaaaggttctttcctaaagaatacttcaaatactgaatttctttcacttataccttttttaaaataggtgtacatcatattaatttcatacaagtctgtatgaagaattaacgaatcgtcttgatcaatttgtgggtaaaacattttgtctccctcatcactactaaataaataatttttttcttgtaccttattataatcaaagatacgcagatatcaaaaagagacaccaaaattgatgtctctataaacttcttgccctacttatccacaatctttacataatctctaatcgtaaaaaattctaaaatttcagctagtttttcttgatcttgcttgttcgctacgtaaaggctggttccccgactaattattttcattaaattaccataaaaaggcgctaatttattttgcttgaacttttgagtaaattcttcaatatctgcgccatgatacacttttagatctttaggaattgtgacttctattttcttttcagaattataattagtactaaaatctacaattgtttgtaagtaaggttgcttgctattcttaaatctattttcaataattaacggagtaatttctttcaatggggtcttgccctgctcaaaaattactggacaaagtgaagcaatatgacacttattaaatacataataaatagcagcttgaagacgataaaatggaattttgattttactggtaatgtgatgcagagtgcgtaattctgctgctaaactaataagcggatcttgattcaattgcttatctgctgtctttttctttttaacaactcgatattttaaacctacaaaattaccattgaccattctcaggcctaaattagtttgagcatcataccaagatggcatcccattcactaaatagttttctcgcacactagtttcaaaaacttctcggcgccaaaaagcataattagtataaatatttacacccatgccgagcgctgtttttaccaggctaatttgattacgataatacggtctaattaagtgcaatttaccatcttttaagcgttgatacattgctcgaattccaacaaacactccatcgcatttttcaccgtaaagtgtactagctgcacgataaaagacattccgattaaataagactttatcagcatctagaacaaaaattattgaaccttccacaaattttgttccatatttaatcgcatgcaaataattatgttgcttttgtttatgatacttaagcggtaaaggtgtattttctaaataccgtttaacaattgtttccgtttcatcacttgaaccatcattaattaagattatctcccaatcacggtatgtctgattcctgattgattctaaagcctcaacaattgtcttagcactattgtgagctggaataataactgaaatttttcgcttatttctatctagttcaatgttaccgaatacgttaactatacataaatctattatcaagactaaaactaaatagctagtattaattacatttgattcagtaataatcaaactaccttcattaatgattaaaaataataaagtccctaaaattaaatggctgtttacgtttaaatgacttttaatttttatgtagacaattgctccaagaatttctaataataaagaaattgcttcaatattccaggaaagatttttaaagacaaagtcagtaaactcaggtgtgtaccaaactagcgaaacgagcaaaacaattaaataaacacataataagaaaggtcttaattgctcgctaaaagtaactatcactctaattacatagaaaataaaagttaaaacagcaacaattaaaattaagattgttccagacctaattgataattgagctaaaatatttaaatttaaaaaaagtaagactaaatttttggtattaaaatgcctatctaagaaatacaaggttcccatataggcaattatagctaaacggtatagcgatcctacttcagtaaaagataaaatttcaatcttgttcaaaatcgctgtcaaagttagaaaaactgataaatagctcaaagccttctctgcaaaccactgatctaaatcttcaatttcaattgataaagttaacaaaagcaggattaaaccatatgccgcactaattataaaaaagccattatcgccatgccaaatattgctacttagttcaaaaattagcggtagaattccaattaaaattgctagcagactacttttatgataattttccactatttttcacccaagataaatttgtaataattttcaattgccactaactgattcctcattgaaaaagcacgcatcaaatacagcttttctttttttgccatctcttcaagatcttctcgactacttgaaattgcttgctttagcttttcactgatatcatctaaatttccaattttagcaacaaatccgtatttttcactaggaatcatcttttcaatgtcgcctacatcagttgacataattggcactagattatcgctagcttcaagtagtaccagagggaaactttctgaataagatgttaaaactgccagatccattttttgatatagtttgctaatctctttctggttcaaaaagccatgaaaagttacctgcgaactaattcctaaatctcgggcaagtgctcttaaattattaaattcgcttccatcaccagcaatatgtaagcgaacatttttatcatcaatctttttaatagcttttaaaagtaaatcttgccccttaactttttccgtccttccaacattaattatattgaaataaggatgagcatattttttaggtaattctttattgtcatggaaaaagatcccattatagattacacaaattttagttttcgggatgcctaccttttcaactaaaaggtcagaaaaattctgcgtaatcgcaaaaataccatcagccttttttaaggccataatatttagcttagtaaaaatatttccaaccattccgcgtccttcaaaatcttttaaaggatcagagtgaactgtgataatccacttggccttaatttgcttcttaatcatcgaaacaaataaattagctcgcgcaccatgagtatgaacgatatcaaagttgccattattaatgaatttagcgagtctttttaaaacagttaaatcataacgactttgggcacctagaatcgttgtcttaatgcctgcttttttagcagctttggccaccggaccatctgctaaggtcaacagttcaaaatcagcatcttcttgattagcttctgttaataaattaacaatatgaaataggccaccgcccttttccagtccggcattaatatgtaaaactttcatttaatttatattcttcctattatttttgctttttagacttttctacttcaactacaaattctggtaaggccagcatccgtttaaaacgcgttggattggtaatcaggcgataaaaccattcaagatgagtcttttgaaatacctctggagctcgtttaaccgcaccagaaaagacatcaaaacttccgcctactcccatcataactgctggcacttctgcttgccgtaataaagaaattagctcctcttgtctaggaaaaccaattgctgcaaaaaccatatcaggctttgcattttcaattctgttagcaacggtttggagatcatccttaaaatagccatcttcagctccaactaattcgattccaggataatctttagcaattttttccttagtaactttcattaccgcaggcgttgcaccaattaaatagacacgaagttttcttaaatttcccacatgcaaaagccaagtaaacaaatcatagcctgttacacgttccttgactggggttttaagcattttcccgcccaaaacaattccaattccatcagctgtaactaaatcagcatcccttttgataagtttcataaatttaggatctttatttgcagccattacaatttcaggattagctgttaccaccatagtcgataccttattatttaagcggttaattaatctatctttaaattcttctaacgaataattatcaaattctattcctaaaatactaactttattcatgctctgttttttaaccatttctaatcgaaatctatctttacttaccattttaacaaaaaagtactacaaacttttttaaacataaaagtttcacttttctctacttctgctagaatagtaactattataagggagtattgattatgaaaaaaattattacctatggtacctttgatcttttgcattacggtcatatccgtcttctaaaaagagcgcgtgcattaggagactacctaatagttggactatcaacagacgaatttaatgagtttagcaagcacaagcaagcatacaataattatgccgaaagaaaatatattcttgaagcaattcgatatgttgaccaagttattcctgaagaaaattgggatcaaaaaatcagcgatgtccaaaagtatgatattgatactttcgtaatggggaatgattgggaaggaaaatttgactttctaaagccctactgtaaagtaaaatatcttgaaagaacacctggaatttctactacccaaatcaaagaagacttaaagtaaaaaatgcatagtacagtcaataaatcaaatttaactgtactatgcatttttatttttcaaaagtaaactcaaatctttcagctacataagatgcacgaacatattcaaaaggataatgatcattaagttctgtaacttgccgtctcgttactaatggttcaccctttttcactgataataagcgtgcttcattttcattagcaacagatgcaccaatattttcaactacgctaccaatcttataaccaccgtttttttcaagagtttggtataaactacttgaaatctcatctttagaaaaacgtgaaactaacttgtaaggaattgtagctacttcataacaaattggcacattatccgcaaaacgaacacgttccattcttaaaacattatccgtatccttaatctttaacttttctttttcagataaagaaggcttagtgacgcggtaagatagtaatttactagaaggaacttgaccattagcacgagttatatcagtaaaactcataattccagacattttttcttgcactttttgactagacacataggttccgctccctaagcgtctttctaaaataccttcatcttccaaggttttaattgcttgacgtaatgtcattctagaaacgttaaacttcaacgctaattgccgttcagcagggattcgttctccaactttatattttttattttcaatatcacgctttatttggttgtgaatcttaatatacattggttcttgcatgataaaccctcacttcattatcctatcaagtttattttagcttaaagtagcaaattagtcattgttcttctttgcttcccagcgcattcctaaaatatttacattagggcgactattacattcaacttctaagtctttgctactacttgaaacaatattcaacttgatcttagcatcatcttgaactgccagcgtgctaccattaggattaataattaaatctcggccacctaaactcgcttgcccatttaaagctaaaaagtattcgaaatcatctctcccagaaaaagcaactctagtcgcatcagcgcttgccttatcctgaaaatccgcatggctcacaatacttgaattatttagcgtaattttagcattgtcacaagcaattagacgatctattttactattttgaattaaagttctggtattcttatcaataaaaactccgcctttaaattcagattgtaatatattcacccaagaatcatcagaaatgtaaaagctagaatcatcatttttttcaacagtcgaattaagcatatttacccaagtctgcccatgaatcaacccataagaaatcgaagtattattcaaatcaacttctgcatttgagtcaggataagtacttaaattaccgtgaatcacgctattagaaataattgccgttccttttccttgaatgcctaaagccgcgtaatctttagaatcataatcaattaaagaatcagtcatggtcaatctaaaatcagcttgagcaaataaagaaacgctagaatttaaaattctacttgaaaatagctcaagggtgcacttaccatttacagcaattgcagccatatcattttcatcaccataaagattggcattacgcaaagtcagataagtatctgcatcgtcttcaatataaatagtattatggtcagatttagtttgaaggcaaatattttctaatgtaaaaaagctacaatcactatcaagtacgaaaaagccactaattacagtttcttctggtgtactacctgttcccttgatagtaatattgtttactgctaagccttgatttagctcataaaaacccggtgcaagcaataatacatcatcaggctgtaagtcttttaatgcgcttttccaatcagtcccatctccgcgaccactaactttaacaagacgtgtcatatcggccaatcctttctacacataaatttcacacattattccttcaaatttcaatttttttagcttaaatataattgttaatggaggtaactatgattaacattactacaaatcaattagcagaaattctagcaaaagattctacaattaatttatatgatttacgaacaccaattgaatttgcatcagggcatattcctgatagtcataatcttccctttgaagaattaaaatacttcaatgatcccaaaaacgagacctactatttcatttgtcggtctggagacctttctcattatgcttgtcaaaccttaaaagctaagggttataaaaacctaattaatattaatggtggcatccttaattggaaaggtaaagttcagagtttaacttaaaaaatataatataacaaaaaaggtcatcaaatgatgacctttttttcgggttgggtgttctttcgaacgattgggttagctggattcgaaccagcgcatgatggtaccaaaaaccattgccttaccacttggctataacccatttgattgaacttttacttgttgttcaatgcaaccagctggaataatccagcaatggaggccagtggattcgaaccaccgaactcagagagagcggttttacagaccgccacgtttagccacttcgctaggcctccgaaacgttacttaattataataacgaaccacctagcaaaaagcaagtaaaaaaataaaaaagttggaatttttccaactttttattttctaattttctattttaattgagcaatatgctttttaataattccagctgattcttttagtttttcatcttcttcactagtcaactctaaaggaataactttttctactccatttttaccaataattgctggataaccaatatacgttccaacttcatctaagtaaaccgaagctggggcaaataagcgtgcatcgctaaagacagcctgaattaaacgcactccgcatgtagcgattgcataggaagtataacctttaccaaaggcaactttcattgagttcttattaggctgtgcgctcaatttttcttcttgttcctttgtaaacaattctttagcggacttgccattaattgataccgttgaccaagcagtaaattgagatgccccatgttcacctaaaacaaagccagcaacatttcttgggtcttcgtttagttcttcaccaacaattctttgcattctagctgtatctaagaaagtccctgtgccaaacacttgatttcttgataggccagtcgtttcttgcaaaatagttgaaatagcatcacatgggtttgaaatattaattaaaacgccattgaagcctgattctttaatttttgctccgacttctttagcatttttagcattaatttcaaattcaccaaatctatccccagttttaactgttgcggcaatatcaccaaaagaagttatgataatatctatattctttaaatcgctgtaatcgcctaaaaaaacattaacatgataatcatttctagctaaagtatcacgtaaatcattgtattcagcttctgccttagcttgatttttatctaataaatataaattatcaacaattccatgagtaaacaaagtgaatgcgactgttgcaccaacgtgtcccattccaattacggctacatttctcattataattcccgctttctataaaattcttacaccttaaggataatccacttaaagcaagttttaaattgtttttagattttttgactagaaacaattttttcatgctgcttaatgttctcaattcgcttctcatttctttttataagcaataaaaataaagcttcaataattgtaaaagctgctacacgagaaaaataatattgattttgcaaaattgtttgtctaacaccagtctttaagtgatagtcacttgctaaagcaattggagaagcaggattattagtgatactaatgacttttagcttgtttttatgggctaactttatttcctttaataaagctgctgattccccagaatttgaaataacgattagacaatctttcctgcctaagttcattgtttgagcatcagctgtttcaacatttccaccagaagcaaatgataataaaccgatttgattaaatttgtagacagcatcggcagctactggataagtatcaccttctgcactaatctggataactctgcttgcttcaataatagaaagaattttttctaatttttcggttggaatttgacttaaagtagcgtgaatttcaccaactttattcttttctatctctcctaacgcagcttgcatatcatctttggggagtttttttaatgattcactctctttttgcccaatacattgtgctaataaaatctttagctcgtgaaaaccagataaggataaattacggcaaaatcttgtaatagacgcatcacttacattcgctcttttagctaattgagaaattgtaatgttgataactactgctggattcttgagaattgttctgcctaccttttgatcagaagttgacatactactcatttgtgcataaattttatcaataatattttccacagttttacctcatttcataaaaattatagcatgattgtaaaattattttcacacattattatttgactaaaattatttttaatattatcatttgctatgtaaataattttcatacaatttatcagttgaaaataattaacgggggtttttcatgtcaataattagtaaagtggtgtggaatctatctttttgaaaaaatagccgctgaaaatgcaaaagtgtagtgacccccgaacttcggacacggatttcgggggttttactatgtctaaattaactaaaaaagataaattgaatatttataaagaatggactattgaaaataaaagatcgacatatttaagtaaaaagtatggaataggctcagttagtattaagtacttagtttcactcattcataagcatggaatggatatattagataagccccatacttattattcagcccaatttaagctagaagctatcaatcgggttttagtcaatcatgaagctgcttactctgtatctttagaattgggcttgaaaagtcaagggatgcttattaattggattcgctcttataaagaaaacgggtataatgtcgttatcaagaggaaaggacgacgaacccgtgaacaaagaactagagaaattgaagaaagaaaacgaagaattgcgtcgccagaatttaaagcttactgtcgagaacgcatttataaaaaaattgaatgccttggttcaaaagagaaaaaaccaaccaaaacagaaatagcacaagctgttagagaattaaggctagaacttgggttgggtgttaaaactatcttatcgattttaaatgatctaaataatgatttacctggtttatctagaagcaattattacgatatcctaaagcgtgaagatcaagatgaaataaggcaccacagtctaattaaacgaattaaagaaatattctttgaacttaaagatagatacactgctccaggttatcgaacaataactgatcacttacatagtgaaggctttataatcaatcgaaaaacagtctatcgtttaatgcgtaaacttaatttgattggatatcgtatgaaacgtagaagacgctacaacagctttgagggtgaaattgaaggaagaattaaacctaacttaattaaacgcaacttctttgctattagaccaaatatgaagtggtacacggatattactgaattcaacttaagaggacaaaagctttatctatcgcctattatcgatggctgtgggagagatattgtcgcttataatatctctcgtagtcccaacttgcagcaggtaatgactatgcttgatgatgcatttaaagttaatgattcattgaatggattagtatttcattcagatcgtggctggcaatatcaacataagacttatcaatatgaacttgcaagacgtggcattgaacaaagtatgtctaggaaaggctgttctccagacgatgggcttatggaaggcttctttggcatacttaaaagagagatgttttatggcaaagaatcaaactatgccaatctgaatgaattagaacaagcgattaaagattatattcatttctataattacgaaagaacaaagagtaaactaaaaggactgactccgattcaatatcggaatcaatccttagttgcataatattaataaagtgtccaatttttgtgggtcactacaaagaatatgttttattattaccaaaagagcgttttaaagagatgcttaatcctactgtttccttatgtattgaaatcattccaaattgtttaaataatttaatgactaaaatacctcaagaatataccgctaaggttcgtctagaccagtcagtagcatcatttgctcattcgccattgggcaacttttaattgatatttatcctagcaattcttggttagacattgaacaattaaatgattttcttctaaaacaaaatggcgttgtaagtagttcttattttaaaaaccttgttacgagcattatcactgaaagcaacaataaagcaattgaaataaagaaaggataattaaaatgacaaaatataattggggaattattggtaccggttggattgcacatgaaatggcagatgctcttcaaacagttaaaggcgaagtatatgcagctgctaacccgaatgaaattagtttaaaaaagtttgcagctgaaaagaacatcaaacatttattcactaatccagatgaaatgattcaagatccaaatatcgatatcatttatattgctacaccacatacttttcattatgactatatcaaaaaagccttaaaggctggcaaacatgttttctgtgaaaaggctattacggtcaatgcagaccaatttgatgaagttgaaaaattagccaaagataagcatttgattctatctgaaggatttacgctttatcatatgcctatttatcaaaaagttaaaaaattgattagagatggtaagcttggtcaaattaagctggtccaagttaactttggtagtttaaaagattatgatcctaataatcgcttttttaataaagatttagcaggtggagctttgcttgatattggtggatacgctactgcatttgccagaatgtttttatcaaagcaacctgaaagtattcttaccacagtaaaattttttgaaactggtgttgatgaacaatcaggaatcattcttaagaatactaaagatgagatggcagtcatggctctttcaatgcgagctaaacaaccaaagcgtggtgtaatttctggaactaaaggttatattgagatctcaaattatccgcgtgcaacagaagcacaaattacttatacagctagtgcccattaagaacgtcatgaaacaataaatgctggaagtacttctgaagctcttgaatatgaaatcaaagacatggaacgttatatatcccaaggacacgatgatggtgaactagctatttcacgagatgtagcccatattttgactagtgtccgtacttcatggggaatgaaatatccttttgacgaaaataatcgtatataaaacataaagactaggaaaaaattcctagtctttttattaactaatgaaaattgtatttttagctttccagtctctaatctttattccaacccaaaagccataaataccaagagtaataatcgttaacagaagccactttatccaattgccaaataaaccaaatgcacttccgataaatttcatccgatgtccttcgattacagtatgattgatctcccatccataaatcatgcacaccgcccaaggataacaaataccgaaagtacaaactgtaataattgttcctaataggtgccagccaatgaaagatagcagcccaccatcaaaaaatgaattacgaccatgtcttgtttccatcagaataagcctcatttctaagtacaaaaaaagccaggtaaaaacctggcaaaactattgggttagctggattcgaaccagcgcatgatggtaccaaaaaccattgccttaccacttggctataacccatccttcaagccttttacttgttggctctatttgaatgaacttaatcactcaacgcttaatatcatattataaatagtaaaagctgtcaacaaaattatcaaaataaacattattatcttcaaataatttcaaataaaaaagaccaccaaaaaggtgatcttcctaattattaattcagttgatattagtaccaaccgttagtttgccagaacttttgagcaccagtccatgaaccgtaacgtgattttacgtagttatctgctacacgttcttggtttgctgctgagtagtctccaccaagatatgatgctgataattggtatttaccaatgtattgaccatttcttgctgagtatgaaccgcctgattcacgtcctgcaatccaagccttagctgcagcttcagagccagatgcgtttgaagtgtagctagtagttgattgggtcttttgtgctacttgagtagtttgtttttgtgctggagcgtagctgtaagttcttcgttgtactggagctgagtaagtacgttgtacattgtagttgtagttagtcttaggtgcttgtgcaacagtttgatgttgtactggtgcttgagtttgtacttggtgttgtacaggagcttgcttagtttgagttgaagcttgtgcttgaacattttgtgaagcagctggagtaacttgttttgctggttgttgtactggtgcactttgagtagtttgtgcttgttgtacagcagtagcagtatttccaccttctacagtgtacttagccatgatccattggtttgcaccaagatcgtaccacttattacccatagcatcataagcagttctgataactttccaagtagtaccatgtactaattccttgccagtaaagtgagcattttcaacgccatcccaaacggcaacagtagaatttgcattattaatagttacaacattagtatcattttgaacaatagtagcagcttgtgcgtcattagtattttgtgaatttaaagctaccaaaccagttgcggtaagggcagcagctgcaagtgacttagttaagatagattgaaatttcaagagaaattcttcctttcgtatttgttcgtatttgtcagtcatttaatttacaagttatataatacagccctaaaatttcaaaactataacataaatgctactacattattaaataaaacagccttatattacatactgtgtaatatttgtaatttaagggcgctttcttgtaatatttcttcaaaaataaaagagacatcaactgatgtctctttattaattatttagctaattttagtaccagccatttgcttgccagaagctttgagcattactccatgaaccgtaacgtgattttacgtagttatctgctacacgttcttggtttgctgctgagtagtctccaccaaggtatgatgctgataattgatatttaccaatgtattgaccatttcttgctgagtatgaaccacctgattcacggcctgcaatccatgccttagctgctgcttcagaaccagatacgtttgaagtgtagcttgattgtgattgtgcaggttgtgctttttgtactggagcttgttgagtttgagtattttgtgctgaagagtatgagcctactgaagtcttaggtgcagaatatgaaccttgagtagtttgagtttgtgcaacagtattgtatgagcttgcttgtgaagtaaacaattctgaagcaacgttaggatcaacagtatctttacctagacgagtatatttagccattacccattggtttgcaccaagatcataccacttgttaccagcatcatcatatgcagctttgataactttccaagcagttgcatgtggtaaatattgtccagtcatttgtttattaggaccatatgaattccaaactgcaatactcttatgtggaaggtaattaattgtaacaaccttttcttgttgaccaacagtaacttctgcagcctttacagtattttgagtattatttacaatcgcagcacctgctaaagtaagagcagcagctgcagcagttttagttaaagtagatttcaaattattgttaagcatattcaaaattaaattctctccttgataaattcgatttgaattatttgtttcgtcaatttcaatttacagcatatataatacatgcccaatattgcagaatagttcctgtaaaattaaagatatatttcaacttgtaacattgctgtaatatttgcctcttaaattacaacaatgtaacgttgtaatcgttctgtagcaaaaaagggcaaaaaaataggagctaagaactctagctcctattttctcttctgcttattagtctacgtttagcttcattaaagcgccttgcatctgtaaatttaagatgaggaaagctagttagcaatcttttttgattccatgaaaatgattctagcagtttatcaaagcgatcattaagcttgttctcatctacctttagctgggaatttaaccgttcatcccaatgtttagtactaagatgaagtttctctacactgataatagtgagaataaaatcagttcccatgactaaaagtatcattaaggctaaataaccatgtgtttttgcttcttcccaattaataattttctgaatgaagggttgaactatttttactaagaaaacaacccctaatccccaaaataaagaaataattggagcaacccttccttgaatatttccccataggtgcgaatagtcccataacttcatatgaaacacatactgtaagaacacgctagcacaatattcaaaaatagtagctacaattactcctactatatatagaagaaaaaggttattttgaattcgatatgtacagattaaaattgttgttacagcaaagccatatacgggacagtatggtccaaatagaaaaccccgataatcataatgatgatctttaattgaacaatatatagtttcccaaatccagccaattacagaatatgtaaaaaatagcacaacaacttcagaaaaagtaaatggcatttttaatacctcatgagcaaactttagtatttcttctatattaaagatatcattatttaactaaatagcatcctaaaacaactctggaaaaatcagctaaaaagcgtaaaaataaacttatctacatatgaaaggtatatataatgaagaatttcaataaaattgctagcaaatatgcaaactttctccgcttttttatcatgatcgctttaggaattttaggcgcgttacttattgttctaatgtttggacaactacttgcaattggacaaagaatgattagaaatagcttcattcacataccaaccaaaattttggatgagattgttactttcttcctcttttttgagttttcagcaatgatcgttgcagcccttaaacacatgggacatacaagcttaaattttttgatgagcttaggaattaccgccttgttaagaaatttaattactgctcatggggaacctatgcaaattttaattcattcaattgcaattttattattaattatcggaatcgttattttgaatagacacataaaactataaattcaactcataggctaatcgattaggatcctttggatcctcctctacctgaataattcctcgttcactaaaattatgctttaaagccaaatgttgcatgattttatttttacgtgacgtatcaatgcgaaaatttctaatttcttggctaaccattattgagattagatccgaaaaaatcaagtttgcaagatgcattccgcggtatttattactaatagctaatcgatgaaaagtcgcataatcagctgtcttatttttccaagaaccatcaattttttggtaggttggctcttcaccaattacactggctgcataaccggcaacttgattatctactactaagacaaaagcatatttatttttgatatcattttgtaccgttttttcattaggataacttccctgccactgactactgccactttgctttagaaataattttgcttcattaatgattgtcataatatcagacaaatcatgattattagcataacgtgtataaactaaagtcactatttttcaccactttcatttttctactagtatacctaaaaaagcaggggaaaacccctgcttttttataatgttctgccgtttgaagcaataacttctttataccaataaaaagattttttgggaattcgttttaaacttccctgtccattttcatccatatcaacatagacaaaaccatatcgttttttcatttctccagtacttgcactaattaaatcaatacatccccagctggtatatcccagtacttcaataccatcctcattaattgcctttgaaagttctcgcaaatggctacgtaaataatttattcgatagtaatcgttaatttttccatcttctaaactatctttagcgcccaagccattttcaacaacaaataatggtttttgatatcgatcataaatttgattaagcgttattctaaatccaagaggatctatctgccatccccattcacttgatttaagatatggattttttaacgatgtaaagatgttaccatttgttttatttatactattattatttccaataacgcgactattgtaataagaaaatgatataaaatctacagtacctcttcttaaaatgtttttttcttcatcatttattgaaatattaagcttttttctttcaaaatattttaaagcataacttggataatatcctcttacttgaatatcagtaaagaaataactactacgctcatcttgcatagcctgccaagtatcaagcggattgcaagtttcaggataaacacaccctgcagctagcatgcttccaactttgttattagggtcaatttcatgagctaatgagacagctttagcgctagcaatcaattgatgatgtgccgccaaataagatgtttgcaatatattttcacctttctcaaaagtaagtcctgcagctaagtacggcaaatgtaaaatcatattaatctcattaaatgtcaaccagtatcgtacttttcccttaaaacgagtaaacaagacatgacataaattcaaatagaaatctatcattttttgattacgccaagatccgtactttttaattaaattaacgggcacatcgaaatgattaattgtaatcagtggctctattttatatttcaaacattcatctatcacatcttcataatacctaagtcctgcttgatttgattcttcttcgtctcccattggaaaaacacgtgaccaattaatagagaagcgataaaccttaaagcccatttcagccattaactttatatctttcgaatagaaattccgaccatcaacagcataacgcgctggaaagttgactgtcttttctaacttatcaggatcaagtaatcccttagcaatgggtaatcttttttctccgtttggaattagatcaacatttgataatcctttgttatcttgtgaaaagccaccttcgtattgattagctgcagttgcgccacctaataagaagttgtcaggaaattgatattttgacattttatctcctcctatttcactgcaactaataatgtatcgtctaaattatcaccatttaatcctggagttaaaacatctgtaaaatcatttgaattagtaataacaactggagtaatagttgaatagcctgcctctttaattttatctaagttaaactccaataatttttgcccagttttgactttgtcaccttttttaactaatggtttaaaatatttaccttctaaatttactgtatccattccaatatgaattagaatctctgctccattttttgaggtaattccaattgcatgtcctgttggaaataaggtagtgatctctccatcaactggggaagtaacaattccttcttcaggaacgatggccaaaccttttccaatatatccttttgaaaaaacctcatcttttactttgcttaatggaacaattttaccttttaaaggcaactcgattttttctcctctaaccagtttttgtagagatttaactttgccgtctttttcatttactgcagtatcatctttccagaaaatcatagttgcagcaaatccaagtacaatggaaagtccaattccaattaaagcaatatacatattatctaaactatgtgttttgggatcaatcattcctggaagttcaaagaatcccataccacccatagcaaattttctcaaattgaagaatccataaaaaccaccgacaatagctgaaacaacgcagctaattagtaatggcttcttcttaggtaaaagtacaccataaattgccggttcagtaacgcctaatgcaccggaaatagctgctggaattcctactttacgtaattttttattttttctagctttaataagcattgctactacaacggaagttgtaacaaaagttgtgcagtaatatggcatcataacattatcaaacccattagtaacaatattattaaaataaatcggaataataccccagtgaagaccaaaaataactagtatttgccataaaccagcaactaaagcacctgccaatgccggtgatacatttctaactgctaaaatacctgaaccaattaagttagagccccaagtagcaacaggtccaatcaataaaaatcctaaagttaatgaaattaataatgtaaacaacgggacaaagaagaatctcacagtttccggaataattttgttaaatccatgttccactttagatgccaagtaacaaattaagataactggtacaacagttgaagtataattcatagaaatgatcggtaaccctaaaaaagtttggtaaacctgagaatgaaacggtgtacctgcgaataaagtaaataatggtttgcctgctttagataatgcatctaattggacagctggataacacaaggcagctccaataattaatcccatataaggatttaacttaaatttcttagctgcactaaaacctaaaataattggtaaaaacataaacattgcatccccaatagcattgagaattgcgtacgttcctgtgctttgagaataccaattcaaacttacaaataaagtattaaatcctttaattactccagcagcagataaagcaattaaaataggttgaaaaattccagaaataatatcaattaaattgttaaaccaattcttatctttcttatcattagcatctaattgagcatcttcttctggatttaagtgtgccactttatttacttcatcgtaaacatcagatacttggtttccaataacaacttggtattgtcctccagctttcataactgtaacaacaccatctgtatttttcaggacctcatcattcgctaaagattcatcttttaattggaatcttagccgtgtaatacagtgctttaaagagataatattatctctcccacctacattttcaacaattatttctgctaacttagtatatttactcattattttcctccatcttttttcaatgaaggtttagccaacttaatgtcactatccaacaaatatatacttaacttttagctgtctgttgaaccattttttcgatgtgtaacgtcagatacattaattcatccccagataattgacaattatacttatcttcaataaacgcaattatctttcgggcataaataaatgattgtggatattggttttctactaatttcaacatcattttatcagggggagtgatatcttgatgcgagaccgtaaaatagtttgtgtaaggatgaattattccttaatttaatttcctaaaacattagaaaaaggagttcctttctcgtatgattggtttgaacaaaaaaacatacagaaagaagaactccttcatgaatgattttaccaaaaatataactcaagctctattcaatcaagataaaattaatgatttgcttcgtcatgaaatccaacaagctgttaatgacatgttagaatctgaactgactgcctttttaggatatgatccctatgctagaaatggctggaatactggtaattctagaaatggtgcgtatttccgtaaaattgatacccagtttggatcaattgaggtacaagtgccacgagatcgcaatggtatgtttcatcaacacactctgccagactataaacaacatactgatctcttagaagatatggttataaagctgtattctaaaggtgtaaccactagagaaatagctaatttgatcgaaaaaatgtatggcagtcattatagtccagctcaagtgtctaatatctctaagcaaatgattcctaaagttgaggcttatcacaagcgtaagctgagcgataagttcttttgtgtttatcttgatacaacgtatataccgttgcgtcgagaaacttttgaacgagaagcagtatatattgccattggcatcaagcctaatggtcacaaggaagttatcgactactgcattgcgcctagtgagaatattgaagtctggacggcgttgctccagaacatgaaatctcgtggtttaaagcaagtagagcttttcctttcagatggcgttgtcggcatgaaagcagcactggcaaagacctatcctcaagctcatttccaacgctgcttggtccatgttatgcgcaacatctgcgctaaagtacgcgtggacgatcgcgaggcaatcatgaacgaattcaagcagattcaccagcaagccaataaagcggctgctgttgatgtattgcatgctttttatgccaaatggaacaagagctacaatcgtgtcattagaaacctgaaagacatcgagccagacctgcttgttttttataattatcctaagcagatcagggcttcaatttactctaccaacatgatcgaatcctttaataacgtcattaagcgcaaggctaagcctaaagcggagttcccgactgaacagtcgcttgatacttttattggcatccaagcaatgagctacaatgaccgctacttcaaccgaattcacaaaggctttggtcaagtccaggataccttagaatcctattttgaataaataaaacgttaaaaaaacaatttacgagaaagatctatttacacaaaaaatttgacagtttccttgatgctgattaaaaattctctgtgccaaatattttaaatgtgttataaaacgataataatatgagctattttcatctatttcttgatgacaagcatattttaaaatttgagttatctcttgaatgaactgcgtaattccatttacatcatgagacccctgttccatttgtgcatctacaatatgcatagtaataaaacctgcttcatcatcatttaagcgaaaactagttaaatgctcaataatatccaaagctgctaaaccaatcttatattctttaggataaaaatgtttaatatcccaaagaaggttattcttcacaaaaattcattctttaccacgagcaattgcattatgaatatgatcacttaaagaaattatttctgtatcattcaaatgcattgataacttattcgaagcaagatttaatatttcattagctgcttccatttcatctaaggaaatatcattcaacatattgattaactgttcagcattttggtgggtttgaggataaaactttttatcaattttctttggatctacttcgtcaccacgttttttcttaaatcctaatcctcttcccataattattgcttcctgattattatcattgatcacaacaatattgttattaatcaccttcttaattttcattattatgttcctcctccctaaatttggcatagaaaaaaccaatatacacttttccctatatcaatagaacattaaaagtatatattggtttagcttaccctgacgtaatcactatccaatgtgaatcaacaataagataatagcatgattttcctatttgagcaagcgctttcttaaaaagacaaaaaatctaacagattttttctatactatttataactttccttcaaaaatttttctaattcttccttagaaaaactatctccataatctttttctaaacgttgtaaaatttgttgatcgtttccaccaaaatcttttagagctagaatcaatttctttattcctattaatttttctttcttctttccttctttcgtcccttgttcgataccttgctgaatcccttgacgaatgccttgctgcattccctgatttattcctttttcaattcctcgttttaagcctctctcttctgcatcttgttcacgttctagcagcttagtttcataatccataatcatatccctccatttctcatcactattaatttctttaattctattttgagcaatatcaaaatatgcatcaccagatataggtaagtttttcattagctttaccaaattaagtaaagtcttagtttcatttccactaggaattccatttgaattaattataattttggttagtccatcctgcaatacatctgtttggttatcagaatttatagttaaatatttacttttaattggtttcttttcagctaaattaaatgagcaaagaaaaattatatagacattcttcagatttcgatatgtacttccttttttcaaagtatatctttgatctgccttcgcagcatagtaacgcattctgcgtgctatatcatcagtgtttgttgtctgtacttcaatgttatagagattatgattataatcttcaactaagatatctaaacgaacgtctttctgatcataatgttcaggatcatttatttcttcttgcttatgtggaaaatagatgtcttcaatagctaactctggcaagattccttgcaaaacatgcttgcaaaattctttatttgacattacttcgccaaacaccttgtcttctgtaaaaccgaaccatggttttttgtgcatattttccattcggcacctctttcatacttttgttctattagttattacgcgaaaaaatgccgaattttttcattatgttaaaaatgtgtaaaaaaaaagcctttcaaagcaagttctacggaactctttgaaaggcttctttagttaataccctgagtgctgaatgccagaatcgaactggcgacctcttctttacgagggaagcgctctaccaactgagctaattcagcaattaacattagaattataacaaagattttctttctctgtaaagtatcaacaaatttttgcaaataaaaaatcgaagtagtattctactccgacttccaattaaaagttagctgtatctggatcagtagctaatccactaactccatgtaaactatctaatttattcatctgttcagaattcaagttaaaatcaaacacttcaacattagcttgaatatacttatcatgaactgatttaggcagtggtaaaaatccatgttctaaagaccagcgaattaaaacttgagctggagattttcctacttcactagctatttccttaacagtttcattacctaataatccaccagtacctaaaggactatatgcttcactaagtaatcccagtttattattaaccttaactacatctgattgtaaatcgcttggattaagcatgatttgattaaccacaggctttatttcagctgttttaagaagttcatccaaatgacgttttctaaaattagaaactccaattgccctaatttttccagcttgtacggcttcttccattgctcgccagctttcagcatttgcttcagcccagtgatcgcgcatggcaacgggattaggccaatgaattaggtacaagtctaaataatcaacctttaaattttgcaaacttctatcaattgccgctttagttgactgatagccatgatctgcatcccaaagcttagttgtaataaataagtcatggcgatttattccgctcttttttattgcttgaccaacgcttttttcattgccataagctgctgctgtatcaatatgccgatagcctgcattaagtgctacttcaactgcatgctttgcaatatctccatcgggtgtttgccaagttccaaatccaataattggaatttctacaccattatttaatgtatatgtatcttcgattgaatgaaaattcatacatctaccccatttctgtatctatccttgttataaaagtaagttgtgaaaccttatgacgatttgactatctacttaaataaatcattaaaagcttctgacatagttggatgggtataaatttgatctcttaaaacagtataggaaagatgagccttcattgctaaagaaatcaggttaattaactcataagattcaattccatataaagttgcacctaagatttcttcagtttcaggatcaactaatgccttaaataaacctctactatctttagcaacttttgcctttggaatggctgcaactggcaacttaaataatttatattctttattttgattgcgtgcttgcttttcatttaaaccaacttgagacaaagcaggtgaaataaagacactataagggaccactttacgatcactgatcatccgtgcgccagtaccaaataattgatctttaataattctaaaatcatccaaagaaatataagtaaattgaagaccacccttaacatctccaattgcccatacattatcaactgttgttcttaaaaaatcatctactttaattgcaccgcgatctgttatttcaatagaagtattttccaaaccgagattttcaatattcggctttcttcccgttgcagctaaaatccgatttgcgctaatttctttttcttgaccgtttatttgataacgaacttttgcttcattttcttcatcaataatttcttcaatatcagctccaagttcaaaatgaactcctgcatcttctaagtcctttttaactaattggctaatatcgtcatcttctctacttaaaaattctctgctatgatcaagcactgttactttactgccgtattttgcaaacatacttgcaaattctaacccaatataaccggctccaataattgttaaattttctggcatcttcttttcatccattgcttgagtagagtcaagaatatacttactttcttttaaaccaggaattggtaacattactggaacagctccagtattaataaaaatacgctcacccttaaattgctcttttttaccattagttaaaactacttcaatttcatgatctgcaataaaatgagcttcaccatctaaaactgtcaccgtttgttcatctgctaacatatggtaatttttattccgcaattgtgcagtcatttcattttttccactcactgcatccacatatgaaacaccattagcggcttcaataattaacctttttgacggtaagcaggcgatgttaatgcaagtcccaccgtacatcttattagatttttcaattactaatacttcttcactcttttgagctaaaaacttagctaaagttttcccacctttaccaaaaccaatgataatgtttttgattgttttcataattttatcctcttactttttataagcttacttctttaactattattttaaacatataatataaaattgcactatttttgcttataattttttgtaattatccaacatcaaagaaaaaataagagaccgtaaaatagtttgtgtaaggatgaattattccttaatttaatttcctaaaacattagaaaaaggagttcctttctcgtatgattggtttgaacaaaaaaacatacagaaagaagaactccttcatgaatgattttaccaaaaatataactcaagctctattcaatcaagataaaattaatgatttgcttcgtcatgaaatccaacaagctgttaatgacatgttagaatctgaactgactgcctttttaggatatgatccctatgctagaaatggctggaatactggtaattctagaaatggtgcgtatttccgtaaaattgatacccagtttggatcaattgaggtacaagtgccacgagatcgcaatggtatgtttcatcaacacactctgccagactataaacaacatactgatctcttagaagatatggttataaagctttattctaaaggtgtaaccactagagaaatagctaatttgatcgaaaaaatgtatggcagtcattatagtccagctcaagtgtctaatatctctaagcaaatgattcctaaagttgaggcttatcacaagcgtaagctgagcgataagttcttttgtgtttatcttgatacaacgtatataccgttgcgtcgagaaacttttgaacgagaagcagtatatattgccattggcatcaagcctaatggtcacaaggaagttatcgactactgcattgcgcctagtgagaatattgaagtctggacggcgttgctccagaacatgaaatctcgtggtttaaagcaagtagagcttttcctttcagatggcgttgtcggcatgaaagcagcactggcaaagacctatcctcaagctcatttccaacgctgcttggtccatgttatgcgcaacatctgcgctaaagtacgcgtggacgatcgcgaggcaatcatgaacgaattcaagcagattcaccagcaagccaataaagcggctgctgttgatgtattgcatgctttttatgccaaatggaacaagagctacaatcgtgtcattagaaacctgaaagacatcgagccagacctgcttgttttttataattatcctaagcagatcagggcttcaatttactctaccaacatgatcgaatcctttaataacgtcattaagcgcaaggctaagcctaaagcggagttcccgactgaacagtcgcttgatacttttattggcatccaagcaatgagctacaatgaccgctacttcaaccgaattcacaaaggctttggtcaagtccaggataccttagaatcctattttgaataaataaaacgttaaaaaaacaatttacgagaaagatctatttacacaaaaaatttgacagtttcaaaaataaagaatcatagtgacaccacataaatttttaaaacagaattttcaaaataagttattgtgataaaattaacttgattcggttattatttaataaaaaaggagtaactagttaatgcgagtattagttatcggtggggccggttatatcggctctcacgctgttagaaagttaattgaagaaggtaacgatgtcgttgtccttgattctctctacactggccacagaaaggctgttgacaagaaagctaagttttaccaaggcgatattgaagatactaatttagtaagcaagatcttacgtgatgaaaacattgatgctgtaatgcacttcgccgcttactcattagttcctgaatcagttaagaaaccattgaagtactacgacaataacgtttcaggtatgatttctcttctgcaagcaatggacgacgctaaagttaagtacttagtattctcatcttctgctgcaacttatggcattccaaagacattgccaattactgaagatacaccgcttgatccaatcaatccatacggtgaaactaagatgatgatggaaaagattatgcactgggctgacaaggctgacggcattaagtcaattgctctgcgctactttaatgtggctggcgcttcaagcgatggttcaattggtgaagaccatggtcctgaaactcacttaattccaaacatcttaaagagtgctatttctggtgatggcaatttcactatttttggtgacgactatgacactaaagacggtactaatgtccgcgactatgttcaagttgaagacttaattgacgctcacatcttagcacttaagcatgtaatggaaactaacaagtctgatgtctttaacttaggtactgctcaaggttactcaaacttagaaatccttgaagctgctaagaaagttactggcattgacattccttacactattggaccaagaagaggtggagatcctgattccttagttgctgactcaagcaaggctcgtaaagtcttaggctggaagccaaagcatgaaaatgttgacgatgtaatcgcaactgcttggaactggcacaagagccacccaaagggttacgaagataagtaaaggtaataaaaataaccattcagttaactgattgtagtgacccccgaacttcggacacggatttcgggggttttactatgtctaaattaactaaaaaagataaattgaatatttataaagaatggactattgaaaataaaagatcgacatatttaagtaaaaagtatggaataggctcagttagtattaagtacttagtttcactcattcataagcatggaatggatatattagataagccccatacttattattcagcccaatttaagctagaagctatcaatcgggttttagtcaatcatgaagctgcttactctgtatctttagaattgggcttgaaaagtcaagggatgcttattaattggattcgctcttataaagaaaacgggtataatgtcgttatcaagaggaaaggacgacgaacccgtgaacaaagaactagagaaattgaagaaagaaaacgaagaattgcgtcgccagaatttaaagcttactgtcgagaacgcatttataaaaaaattgaatgccttggttcaaaagagaaaaaaccaaccaaaacagaaatagcacaagctgttagagaattaaggctagaacttgggttgggtgttaaaactatcttatcgattttaaatgatctaaataatgatttacctggtttatctagaagcaattattacgatatcctaaagcgtgaagatcaagatgaaataaggcaccacagtctaattaaacgaattaaagaaatattctttgaacttaaagatagatacactgctccaggttatcgaacaataactgatcacttacatagtgaaggctttataatcaatcgaaaaacagtctatcgtttaatgcgtaaacttaatttgattggatatcgtatgaaacgtagaagacgctacaacagctttgagggtgaaattgaaggaagaattaaacctaacttaattaaacgcaacttctttgctattagaccaaatatgaagtggtacacggatattactgaattcaacttaagaggacaaaagctttatctatcgcctattatcgatggctgtgggagagatattgtcgcttataatatctctcgtagtcccaacttgcagcaggtaatgactatgcttgatgatgcatttaaagttaatgattcattgaatggattagtatttcattcagatcgtggctggcaatatcaacataagacttatcaatatgaacttgcaagacgtggcattgaacaaagtatgtctagaaaggctgttctccagacgatgggcttatggaaggcttctttggcatacttaaaagagagatgttttatggcaaagaatcaaactatgccaatctgaatgaattagaacaagcgattaaagattatattcatttctataattacgaaagaacaaagagtaaactaaaaggactgactccgattcaatatcggaatcaatccttagttgcataatattaataaagtgtccaatttttgtgggtcactacagataactgaatggttatttttttatctcaatttattgacacactctttcatttctttaatatccaaaatactttgcgcaaattcttttcttactaattcatctggtaaatactcatcatatttatcaaaaacaggaacttctttcggataaactaattccaatggatcgaagtctttatttgcttcttctttcagaatttctaaaaattcatccttacctacatccatcgcaaattgcataaaatatggtcgactagaattaaaacctcttaagccaaggcgtttagcacattttatcttaattaatctttctaatgctaaaaacgcataagtaccagtccaaggaaaaagacaccacatttttccaccaagattaattaaattactctctagcatccttgaagtttgtgctgtatcccgcacttcttttaaacgcgctacagcatgcttcattaagtatggatattgcgttttttcgcctaagattttcctcattctctgtaaaatcttaggttgaatgtctcctgctacatccccgaaataagctggaattcgtcctttaacaggatagcaataaacttgatgtcgttttcgatctacatcctctactacccaaacacggccagcaattgcaatcttatctccaactggaggtggcttaacaattgttcccaattcttcagaatcagatttaacagaatattcttcattttcttggaaaacagcataaaacttaaaattgtttattactcgctctccagttaatccaataatcaaaccaccattttcggtttgttgaatatgatcttctttgatcaaataacgtaatagaactcgataatcattttgactaacgttatggaaataatggagcgttaatactcgagatgccagttcagctggagtcatttccccgcttgatgctaaagttgacatagtttgatgatacagcaaactatatggtagtctgttgggttctggcggttccacccatttttcttctaaatatagctgaactaaagcaattccttggagtaatgaccaagggataatttccggcagcatcgcacgagactcaggatgggactcccgcatcacaaaccacatttctgctggatttcccctgcgtccagttctacccatcctttgtaaaaaaccagagactgtaaaaggagcatcaacttgaaaggcacgctctaattttccaatatcaatacctaattcaagcgttgcggttgcacaagttgtcattaatgaatcttcgtttttcatttcagcttctgcagtttggcgatatgcagctgacaaattaccatgatgaattaaaaaacggtctggctcatgatttatttcacaatactgtcttaaaatttgacatactgcttcgcattcttctcgactattagtaaaaaccaaacatttctttccacgcgtatgttcaaaaatataagccatcgatggatcagccatttgaggtgcctgatcacttttctcatctaaaactggctgagctggggcaaagccactactatcagcttgtggtccattatcataaaaatgctccatcgataatcgccaaacttgacccccactttctgtcttaggaaccgtagttctacgtttcgaccctgctcctaaaaatctagcagcagattcagtatcaccaatcgttgcagaaagtccgattcgccttggatcaactccagccattttcgataatctctcaatcaaacaaaaagtttgtcctcctcgatctgatcgtaaaaaagaatgaagttcgtcaatgactacatatcttaaatcatgaaacaaattaggaatatccatatgcttgttaatcatcaacgattctaaagattctggagtgatttgtagaattcccgatggatgcttaagcagtttccttttttgggtttgagctacttcaccatgccaacgccaaattgggatatcaacatcttggcaaagatccgttaatcgttcatattggtcatttattagtgcctttagtggtgaaatatacagaacaccaacagagctggaaggattttcatatagatccgtcaaaattggaaaaaaagccgcttcagtcttaccagacgctgtcgaagcagctagcaagacattatcttgactattaaaaatagtttctgctgccccaacttgaattgatcgtaaatttttccaattatgttcataaatatagtcctgaataaaaggagcaaaacgtgtaaaaatatccattttttcacttaaattctaaactcagcaaaattatcagacttttcatcagaaacagcctctgactcagtataagaaaacttatcagaattaagtagctgctcaatattagtcttaggattttgccaaacaatatctaataattcaataaaatcacgaataatctcacgtggcgtaatattggaagaagcacccacacgtgaatattcaattttaataaatttttctaagtcatcctctgtaattgttctttcatatccatataaatgagcgtgcatgtctgccaatttttcagctaaaactagcatttcttcaggagtaagaggatcaagtttgataacaggagcatacatgtccctattaccagcttctgaaaattttccgctagcaagacgtgaacgtaaagcctcgtaagaatatacgcctcgtctcttgtcttcaacagcttgaggcgtaccacacataataattcccaaatactttgattttccttgtaaagcatcattatacattgttagtatcttttcataattgtactgccggctgatactattcggaattttataaatattaactaattcatcaatcataatcattaaaccagcatatccagcctgtctaaagaatgaagcaaataacttaaggtactcataccaatcatcatccgagattacaatatctacccctagctcttttttagcttgagtcttattttcatattctcccctaaaccatttaataactttagctttagtttcttcatcattattaatataggcttgataatacattttgagcaatttagcaaaatcaaaaccatgcactaattcagaaagactagaaattaccgcatagatctttttattaactgcttcttcaaaagctgggtcatctgcatttaaattagtgtctgtggcaacttgcatttgaactgaattaatccagcgatcaagaattaaagttaaggctccaccttctggtctagtcttagtagaaagattttgaatcaactcacgataggtagctaatccttgtccttttccaccttgcagacgtctttcaggtgataaatctccatcaactacgacaaaattcttatccattacataatttctaattgtttgaagcaaaaaactttttccagacccatatcgaccaacaataaacctaaaagatgcgccaccattttcaattaactctacatcatgcagcaaagcttcaatctcagcttttcttccaaccgtaatatagggtaagccaattcttggaactactcctccttttaaagaatttaatatagtttgagctattctcttaggtacttttctttttttattaatagccatctttctaattttttcctttcaaaaacatgtcttctatatcttcttgatagtcttcaattattgctggtacatcattgacaaattcgattacattatcaccgatttcatcaaaaagtctttcatttatattgtcgatcacaactgctgtcattagatgcttttctttaagatattgagcaggattttcaccttttaagagcatcttgatagtatgcaattcttctcgacttagaccataatcttcaaaatcctcgtccctatctttttcagtaatttcttcaagttgcttttcttccttttcagctcgtaattcttcctcagttaataaactatcccttgtaccagcggcatcctctctgatggtagacaaatgcgctaaattaatttcaatctttggttgttttaatttatattcttcaattttgtacttcttaattccatcttttatagcctgaagataatgcttttcaatttttctaggctttaagtttcgccctaaattaaagtttttcctaacttcacgatcaacttcgtgcagtaaatttccaacaatacttttttgacctgctaatccccaataagactcacaataccacgaagctttttctttatcataaaaatactttctaatttgatcaatttcaaaattaactgtcttaggtattaatttatggttgaacacagcagcggaaaataactgcaccgtcatctgatttttataagtaatataattagtcaaaaaatcaaaaccatcttgacgtaaatctaagatttgctgccaaactaaaactaataaatgttcaaatttttctggattctttttatataaaggacagttttcaattttataattagataaatttattaagctttctgcaacttcatgatcagaaaattgatttggatacaacaaatgctcatattttttatccttctcctgctctttctgaaaaaattcatttcttttttcattaatattataaaaaataatatagtcgcgaatccatctatcaagatatgctgccatttctttggaaaaaatttgagcataatttttattaaaattgattaacttatctaacccgtcttgaacattctctacgcctattccatttaataactcatataaataaatataagcatatgaattagataccttctcataaatattattcctaaccttagtgcgccaagcaaaataagtccgtgcttgtccaacagttaattcatggtaagtcggataataacgcaaaaatgactgcttcttttgataattatcttcataagtagccattaatttaccttgcaaataaaaattctgttctttgcggaccgaacctgccaaatcataacgatatgacttaatcattttttgaatttgttcgggaacagatgctgtgttttcaaaatttaaatcagtttttgcttcattagaatcagctttttgcttaggattattattgtcattagcttttttccaattattaaaatttattttttgttcatgataaacatcttgttgattcgctttatccgtattcgcatcaggtatatagattaatttttcaggattaggtaccttatttgacatgagcactactttgaaagcatactctaaagattgttttatcttttgttcgcttaaaagcaaactaacttctacccacttgttatctcttatcaaagaagcagctgagaaccccggtaaatctctaatggtcgttgcgaaatcgccacaattgatatttaatttcttatttttaggatctaaatctaaaagagcaaaccaatttttagtaatcggtgaactaaaagcaactaaattagaattatcattaagttcactaatactattctttccaaagtgtctaatagcatagctcaagagttcatcaatattcatggcctcagctcctttcgaacgtatattctactatattttacttggtcgatccataaacttgcagcaaaaaaggcaccgaaatcattcaatttcagtgccaagaaagaaattattttacttgattaataacattaattgcatttaggctacgtggatagccaataaatggtacattagctaaaactatttttgttaaaaactgttgatcatttcctaagccaacatttgtcttagcatgagctaataattgtggttcacaaacgccctgaacagctaagtaacagaacgtaatcatttcgcgttctttgtcactaagaccttttctcgtgtaataatcaccgaaacaattatccactaaccacttattaatagtcccctttttagcaaagtctttcatttgaggaccaaacaatctcatctgagtttcctcgcctttttcaagcctatcctccatcattgttgtagcttgttttggcaaaggtaacttttctccgcgagcaagcaaaatagtattagttactttaaaaaatggcattacacgccctaagcctaaataatcaactgcttgataaacaacctcttttacttcaactggacttacaccattatctaaagctacaggtaacatcaaacgatattcttctaagccctgcatccctaataaataagctaaattagaaattaattttgttttatttgataaatctacatcatcttgaacttcttcgaaagtaaaatgactaattcgctcccatgcttctggatcattttcttttaaaactttttcatgaatatttttttatcttctctaaacattaactcacgcctctttcttatgttttctattataaagagagccagatagattgaaaattactttctttctatgtagaaatatgctatcaaagtatagaataaaaaataacaaatatagtaacgttcaaaataatatactaaactaattgctattaattttatgttgatattaggtatttcaaacatatacgcttattcaataaaataacatcttgttcttgaagtcacagtagttagcttttatattaaagatgattaagttaatagatttgattttatgaggtacactgctatgacagattatgcaaaaagagaacttaaagcattagatagaattgctaaaaagatttcagatgcagaaagtcacttaacaaagattgaagatagtattgatgataaaaaacatcgcaccgctcaacacgaaacaattaaggatattaaatcaattcttaggcacgcaagaaaagtcgataaagatgaagataagatggaacaattcaaaggtgaaggtcctaaagattcaaccaaaaatcactacgtctacgaacaagaagaagaacctgttatcaacgacttaaagaaagatttcaatgaattagatgataagcttgctaagttaaacgactttaatggcggagatattgatgcctttagaactgaacaccactatcttgaaaaggctcaagacatcttaaaaaaggctggtaaattaaactaattaagttctaaacggtaatctattaatttacatacacatcaaaaaaggagaggcaaaattgcttctcctttttatatgcgaattcatattgacatttaaatgagatattggaatagagataaactaggcttcaataccctttcccttataagtttctttcattaagtctttaatttcactaatcaacaaagcggaaggattagttacgacattttgatctccataagcctcaacagccatagcgtcaactttattattgaaatcagcttcgctaactccattagctttaagactaaggttcagtcctacaccgtgacctaattcgacaattttcttaattaaggaatccactaactcttgatcagtgttaccctttaagcctaagctacgagcaattgcagcataatccttatcagctctaaaagttgaatagtgtggacgcatagcaagttttcttggtttcttagaattaaatctaattacgtatggcatagcgattgcatcactcaagccacttggaataccaaattcagatgattcagtatgagcaattgcatgtcctactcctaagaaggcattagcatatgccattccagctaaagtagctgcattatgcattctacttcttgcactttgatcaccattatatgatttttccaagttttcaaaaatcaacttaatagcttccattgaccagccacgagtaaagtcagtagccattgtagaaacataactttctactgcgtgagccaatgcttcaaaaccagaacgtgcaatcaattctttaggcattgtttctacgaattgatcgtcaacaattgcaacatcaggatttaaagaatagtcacaaagagtatgtttaatgccagttacagtatctttaataatagaaaatggtgacacttctgagccagtgcctgaagtagttggaatacatactaattggatggcattatattttggaaaccttactgttctttttctaatgtcccaaaattttgaataagcatcagcaaaactcatatctggattttcatagaataagcgcattgctttagcagcatccattaccgaaccaccaccaacagcaataactacatctggtttaaagatattcattctgtgaacaccatcagcaattatagtagtatctggatctttagttactgcttgaaagacttcatagctcttctttccacgacgttgactaatgatatcggtaatttcattaatgtacttacttgctacgccttcatcagtcacaatgaaaaatctttcaacatctggcatatgctttaagtaatttgcagcattatgttcaaaatacgtcttctttggtactttaatccactgcatattatcgcgacgctttgcaacggtcttaatattaagcaagtctctagcaccaatattatgtgagaaagtatttgctccgtatgaaccagttcccaaagtaagagaaggaagcatattattgtataaatcaccgaccccaccaactgaagcaggagagtttactaagatacgacatgcatccattttcattgaaaagtcatcaataactttttcatcttgtgagtgaactccagcagtatgtccacgaccaccatagtttagaagatcagtacaaatcttataagcatcttcatgatccttagccttgtacatagtaaatactggtgaaagtttttcagctgataaaggatactttttacctccccccttatattcagcaatgattactttggtatcttctggaacatctacgccacataacttagcaatttgataagctgaacgtcctgcaactggaccagcaactgttcctcttctaggatcgataaacttttcttcaaattttttgatttcatctggtttcaagaagtagcagttccaagacttaaattcatcttttaccttgttgtaaatttcttcatcaactactacagaattttcagatgaacaaatcattccattatcaaaggttttagacaaaacaatgtcataaacagactctggaatattagcagtcttttcaatataggatggaccattaccaggaccaacaccaatagcaggcttaccagatgaataagctgctttaaccattccgggaccaccagtagctaaaatagtttgaacatttggatgattcattaaagcactagttgcttcaagacttggatattcaatccattgaatggcatctttaggtgcacctgccttaactgcagcctcacgaataatttcaccagtttttacacagctcttctgtgcttgtgggtggaagccaaaaataatagcatttctagtcttcaaagcaagcattgccttaaaaattacagttgaagttgggttagtaactggagttactccagcaattacacccttaggttcagcaattttgactaattgcttttccttatcttcttcaataacacctacagttttctcgtggcgaagactgttccaaatattttcactagcgaacatgttcttgatcgttttgtcttctactacaccacgaccagtttcctcaactgccatttttgcaagaaggtaactattttgctctccagcacttgcaatagcctcacatattttgtcaacttgttcttgatcgaaatcggccatctcatctaaagcaacgtgagctttttcaacataaccatcaatcattttatttacatcaattgttttttcttcttttgtagcctttttatcttgcaccatctaaattgggcctcctactcggaaatctaggcatatttttatgaacaatgacagtatagcgcctatcttagacatttgtaaatgactttgtgcactcttttacaaattaacaatatgataaaaagtaagaaatagctgttttaagtaatgatatcgtttacatttttgataatattgaaaaatatttcacaatataactttgatttacaatcttataaaaaatattaaaacctatacgttttaactattgtcatagatttttatgttaaaattttaataaactatgaaaggagttttacatcttaatgtcaaaaaacaactcagaaacatctgagattaaaactatgaagcgtagtttaacaaatacccatatccaactaattgcattagggggaacaattggaactgggctttttctaggagtcggaaacagtattgaactagcagggccagcagtaatttttatttattgcctagttggtttcttcctttttcttttaatgagagcactaggagaattgatactttctgatattaagaaaaatacctatatcgattttattacagaatacctaggaaaaagtattggtacaacaactggatatttatattggtttagttggctgacgttagctatggcagaaattaccgctttaggtatttactttcaatattggtggccaaatttgcaaagctggattccaggattgattactttattggttttactatctattaacctaatttcagctcgagtattcggtaacttagaatttagctttgcaattattaaaatcgtaacaattattgcgtttgttattctagttttttatttattaatcacaaactctgcaacaaaatacggacacgtaagctggcagaatatggttattgatggcggaattttcgctaaaggtcccaaaggttttttactaggtttccaaatggttatcttcagttttatcggagttgagttaattggattaacagctgcagaagccaaagagcctaaaaaaacaattactcgagcaattgatcaattaccaattagaatcattttattctacgtcttagcaattttaagtatcttattagctatcccttgggataaggtgtccacgtctagttcaccttttgttcaagcattaggtgctactggtatcaaaaatgctggctcaataattaactttgttgtaataagtgcagctatttcatcaaccaatagttttatctatagtgcagggcggttattattttcaataaattacaagggtaaaactaaattaagtaagcatttaggaaaactagatcgtcgacaattacctaaaaatgcattaatattttcaacaattttaatcgctttagcaccacttttgaatttctttttaaaagatgcctttactttcatttctgctacagcgaccagcatgtttttagtaatttggtcaatcatgatcattacccatatgacttatcgaaagaagacaccagaaaatgaattaccaacattcaaaatgcccttatatcctttatctgatgtggcagtattaactttctttcttgctatgattatcattcttttaatttttccaaattatcgtattccaatgattagtgcaggcataatttttgtagtactcgtatgtataactcactttatacataaaaaaatgaattaattctttacagtctctagctaactctagagacttttttatatactaattaaacctaaccaacaaaaaaggagaatgaagttatttctccattctccctcttttatttcttcgctttaccttactccgactgtcagactcgaactgacgacaacctgattaacagtcaggtgctctaccaactgagctaagccggaatattaaaaaagagcacggcgactgcctaccctcgcaggcagtttcccaccaactactctcggcgttaagaagcttaacttctgtgttcggcatgggaacaggtgtatccttcttgccatcgccaccgtactctttctgagcttttacactcaaaactgaatataatcttccgctctaaacctttgagctttggtcaagtgctcgactgattagtactagtccgctccacatatcgctatgcttccactcctagcctatctacctcatcgtctttaaggtgtcttactgcttacgcatcggaaatctcatcttgaggggggcttcgcacttagatgctttcagcgcttatcccttccatacatagctacccagcgatgcttttggcaagacaactggtacaccagcggtatgtccatcccggtcctctcgtactaaggacagctcctctcaaatttcctacgcccacgacggatagggaccgaactgtctcacgacgttctgaacccagctcgcgtgccgctttaatgggcgaacagcccaacccttgggaccgacttcaggcccaggatgcgacgagccgacatcgaggtgccaaacctccccgtcgatgtgaactcttgggggagataagcctgttatccccagggtagcttttatccgttgagtgatggcctttccatgcagtaccaccagatcactaagcctgactttcgtccctgctcgaggtgtacctctcgcagtcaagctcccttatacctttacactctgcgaatgatttccaaccattctgagggaacctttgggcgcctccgttacattttaggaggcgaccgccccagtcaaactgcccacctgacactgtcctccagaacgctcagctctgcgagttagaggatccatcaaacaagagtagtatcccaacattgcctccagtaagactagcgtcctactttctctggctcctacctatcctgtacatgtttaacaaatactcaatatcaagctacagtaaagctccatggggtctttccgtcctgtcgcgggtaacccgcatcttcacgggtattataatttcaccgagtctctcgttgagacagtgcccaaatcattacacctttcgtgcaggtcggaacttacccgacaaggaatttcgctaccttaggaccgttatagttacggccgccgtttactggggcttcaattcaaaccttcgcttgcgctaagctctcctcttaaccttccagcaccgggcaggtgtcagcacctatacgtcatcttacgattttgcagatacctgtgtttttgataaacagttgtttgggcctattcactgcggctgatcttttaccatcagcaccccttctcccgaagttacggggtcattttgccgagttccttaacgagagttctctcgctcacctgagtgttctccactcgactacctgtgtcggtttgcggtacgggtaaaattgctctggctagaagcttttcttggcagtgtgacatcatgaccttcgctactttgatttcactccgcgtcacagcttgaaatctaaaaataagcatttgactcatcttttttcttactgcttgcacatgtttttccagctacatgcgtcattagcctcctgcgtccctcctttgctcttatcgaacaatttcagtacaggaatctctacctgttgtccatcggctacgcctctcggccttaccttaggtcccgacttaccctgggcggacgagcctgccccaggaaaccttagtctttcggcggataggattctcacctatctttcgctactcataccggcattctcacttctaagcgctccattagtcctctcgatctaacttcgccgctcttagaacgctctcctaccacgcatatcctttgatatgcatccacagtttcggtactatgcttagccccggtacattttcggcgcagcgtcactcgactagtgagctattacgcactctttaaatggtggctgcttctaagccaacatcctagttgtctacgcaactccacatccttttccacttagcatagatttggggaccttaactggtgatctgggctgtttccctttcgactacggatcttatcactcgcagtctgactcccgtgcattgatatctggcattcggagtttatctggattcagtaacccctgacgggcccctagtccaaacagcgctctacctccattatcattcacacgaggctagccctaaagctatttcggagagaaccagctatctccaagttcgtttggaatttcaccgctacccacaactcatccccgcgatttttaactcacgtgggttcggtcctccagcgtgttttaccacgccttcaacctggtcatgggtaggtcacttggtttcgggtctacgtcatgatactctctcgccctcttcagactcgctttcgctccggctccgtcttttctgacttaaccttgcaccataacgtaactcgccggttcattctacaaaaggcacgccattacactttaatgtgctttgactacttgtaggcacacggtttcaggttctctttcactccccttccggggttcttttcacctttccctcacggtactggttcactatcggtcactagttagtatttagccttgcgagatggtcctcgcggtttcaatcgggattcctcgtgtcccgacctactcaggatcctgctaagtctctctgcaatttcgcttacggggctctcaccctctctggcttatctttccagataattctgctatcgcttcaagtactttattgcagtcctactaccccaactggcaagccagctggtttgggctctttcctgttcgctcgccgctacttgggaaatcgatttttctttctcttcctgcagctacttagatgtttcagttcactgcgtcttccttcaacagccttaacagctcttgataatacctcgcggtattgggttcccccattcggatatctccggatcatcgcttacttactgctccccgaagcctttcgtggttcgtcacgtccttcatcggcttctagtgcctaggcattcaccatgcgcccttttctacttgacctatttcaagttgagtttctctctcttctcggtcgctcttcaatctgttttttcgattgtctcggttttttgctttagattatattcagttttcaatgtactagctctctgaggtattaccctcaaaactaaacaaagtttctcagtgtgcttccgcttggctttctcgatgacttctctttagtgctctcacactctccatcatctttcgccttccttagaaaggaggtgatccagccgcaggttctcctacggctaccttgttacgacttcaccctaatcatctgtcctaccttagacggctgactcctataaaggttatcccaccggctttgggtgttacagactctcatggtgtgacgggcggtgtgtacaaggcccgggaacgtattcaccgcggcgtgctgatccgcgattactagcgattccagcttcgtgtaggcgagttgcagcctacagtccgaactgagaacggctttcagagatccgcttgccttcgcaggttcgcttctcgttgtaccgtccattgtagcacgtgtgtagcccaggtcataaggggcatgatgacttgacgtcatccccaccttcctccggtttgtcaccggcagtctcattagagtgcccaacttaatgatggcaactaatgacaagggttgcgctcgttgcgggacttaacccaacatctcacgacacgagctgacgacagccatgcaccacctgtctcagcgtccccgaagggaactcctaatctcttaggtttgcactggatgtcaagacctggtaaggttcttcgcgttgcttcgaattaaaccacatgctccaccgcttgtgcgggcccccgtcaattcctttgagtttcaaccttgcggtcgtactccccaggcggagtgcttaatgcgttagctgcagcactgagaggcggaaacctcccaacacttagcactcatcgtttacggcatggactaccagggtatctaatcctgttcgctacccatgctttcgagcctcagcgtcagttgcagaccagagagccgccttcgccactggtgttcttccatatatctacgcattccaccgctacacatggagttccactctcctcttctgcactcaagttcaacagtttctgatgcaattctccggttgagccgaaggctttcacatcagacttattgaaccgcctgcactcgctttacgcccaataaatccggacaacgcttgccacctacgtattaccgcggctgctggcacgtagttagccgtgactttctaagtaattaccgtcaaataaaggccagttactacctctatctttcttcactaccaacagagctttacgagccgaaacccttcttcactcacgcggcgttgctccatcagacttgcgtccattgtggaagattccctactgctgcctcccgtaggagtttgggccgtgtctcagtcccaatgtggccgatcagtctctcaactcggctatgcatcattgccttggtaagccgttgccttaccaactagctaatgcaccgcaggtccatccaagagtgatagcagaaccatcttttaaactctagacatgcgtctagtgttgttatccggtattagcatctgtttccaggtgttatcccagtctcttgggcaggttacccacgtgttactcacccgtccgccgctcgcttgtatctagtttcatctggtgcaagcaccaaattcatctaggcaagctcgctcgacttgcatgtattaggcacgccgccagcgttcgtcctgagccaggatcaaactctcattttccttcttgaaaatgagctttttatcgtttagctctaaaactttctttgagttatctcaaatttattgcttgcgaattgacttcgcttttgtttgggattttttatatcccgcacactttcagcgaaactttgttcagttttcaaggtactaccgttgccgtgtgacaacttttatattatatcatgtctcttgagctttgacaagttatttttcttgcccctcatctttctcaaatgacagctttataatattattatctttctgctcccttgacaagctctttgcttggcttcctgcctctgcttcgcgctcgcctcaaacagcatgtattactttacagacttttctctctttcgtcaatatagtttttaataaaaaaatatattccgaatattaattattaatagattttaattgtctgatttttgccttttgttttcacaacttaaacgaactcttcattttgaaaattcggatataaaaaaactgtgttaagcagtaatacttaacacagttttatttattttttcaattctggagcatccgttttaaaatcactttgtgtggattttttaccatttttataccatacgctgtttttgctcttcttttctgcctttttcaatctcttcaaagaatcggcctttttataagtataattctttctttttacatatttaaaaccattcggcttatagaaacgaagtaaattaccagtaattactcgatcagataatgataactctgttgttactgtattagaaattgaggccaattgtgcctttaccttcttacttggatgagttacacgtttacccgatttagtataataataacttccctctactttgctgtattttggtgtaataaagtcaccatttctttgagcaacaatttgtggagcattctttgctaaaagactatgtccaaattggatcatattctgatcattgatacccaacaagttaaataaagttggtctaacatcaatctctccaccatatgtatgattaataccgcctttaagtcctggcatatggaacattaaaggcacacgctgaaattgtaaattatcaaaattattaaagctatctttattcagcaattgtgccgaagccttatggtgattccctgaaattccataatgatcaccataaagcatgattagagtatttttctccaatcctgactttttaagataactcataagttctccaatagcttcatcaagataatgggctgtttgtacatatccatctaccgtcttatcaccagtatctgttttatcaattgactgatttttcttgtctaaatcataaggatagtgatttgttacagtaatcatcttcaaataaaaaggttgcggtaaatgttccatgtatttaatggactgatcaaaaaagagcttatctttaattccatatcctaaataataccctttcttattttgataataagataaaggcataaagtaatcatacccaaaggatttataagcattatcacgattccagaatgatcctgcaccaccatgcataactgcacttgtatagccagcttgttgtcctaagatagctggagcactttcaaaagtattagacgttccatagcttgacattgctgagcctgattgtaaaccgaaaatagaattttctaacatcatttcagcatctgatgtctttccttggcctacttgattaaagaaattatcgaagctgattgtatcatttgcatgatagagcttattcaagttgggagtaacttcttttccatgccacttataatcaattaaaaattgttggaaactttctaagtgaataaccaatacatttttatttttagctacaccataatattcagggttcggagcaatatagttctttttaatataggattgaacagtttttaaatcactatgatttgcttttgccataatcgcattactttgagctgtttttacaccatcataaacagcaaaagaatttaatcctaaatatttgacaatataattattatcaaaagttcttgtgagcaaaccaggtctgtctttttgcgccatagttagatttgtaccaatcaatactacagctaatccttcaattaaaagagaaatctttagctttaagcggcgaacatcaatcttaaaaactttaaaagctattaataaaacaataataactacatccaaaaatactaaaaaatcagtacctttagtaattccagcaatactctttcccaaattatctgaagtagatccagaagttttaataatggatgtagataagaaatcggaaaattctcgataatacaaaatattcgaaaataaccacaaagataatagaaaatcaattatgaccataatccaatatgactttctacccttaaaaaataatccgattccaattaatagcatggctgttggtagtggattaatcaatagcaaaaacttctgcattggtcccactactcccaaattaaacttagttatataagttaagtatgtcttaacccagaaaaatactacaactacggtaaaaaagcctaatttggttttagttaaccaattatatgatgcttttaggcgtcccatttaagtcctcctcaactttgttctttcatgatattactactaaaaaatggttttgataaattaaaatagtaaatttaaggaattttaatgactttttacttttttcggcttaaatagccacccaaatattcctagaatcattccaaaaaagtaagtggtaaagcgccacaaaaacatccctaaggttaataatatatttgaatgaataaaggtagaaaataaagtctgaaaactaaattcagctccacctgatgcacctggaattggaacaatcgccataaacataataatcataatattcatctgtgttacttctaaccaagaaggagttaaatttaaagccagtaaaattaaatatggaatcgaataaaagcatagcaattgcccaatagtcaaaatacttgcaccaagtaattttttcttttcacgttttaaattttgaccttctgcgtaaaaagtttcaattttctccatagtatttttacgccacttttcaacagtattcttattcatgaatctttctaataaattcatcagccaattagttgcattttttgtccatcgataggcaaacataatagctaataaaaatattattgaactaacatgaagaataaaaccaattaagataaacaaagctaacccagaaaatttggttattaccatatgaaaaccaaaaataattgttgaaacataggcaaacaaaacgcaaatctgataaataataaacttcatcagtaaaattgaagtagcacgtccgccttctattcccatttgaatcattgctactaattgtgaaggctggcccccagtagataaaggcgttatggcattaaaaagtgcttgaataattggaattctaaaaaaagaccatgcagagcgatgaggctccccttttttatgctctaaaatccaaataattgcggcttcacaggcataagatagaaccattaccaaaagaactagtaataaaaagcttatatttaatttcttgctagctccccataatgctttaattggcgtttttcttaattcttgccaaataacaaaaccactaatcagaagaacaattagcattccaataaaatgttttttgttcattacttaatttgccctaactttctaccaatttcatattgctccatataaaagtcgtaccagattttagcgagatggtcttctgaatactcttgacttgcctcagcagacaatttttgatattttttcattttttctggatttgatactacagatttaatttgagcatttaactcctcaaagtttctgcccttcatataatatccatcaataatagcttgatataagtccaaatcacgcaataatacaggagtattacatgaaaaagcttctaaaacagacattggaaaaagttcatcgaaagatggcagtaagaacagatcagcaatatttaaataactgactaattcttctcgtggcacaatccctgtgaattttaaattcttaggtggattatcaattatttttttaaagtgtgcatatccatccgtcatttttccaaatgaaaagccaccagcccaaataaattgaatatttggatttgcttcggctaatttaacgaaatcatctacgccctttctttcttgaacttgtccatctccgacaattacaaatttatctaaagggatattcaatttatttctaaatgcatttttttgaacttgactctgctcataaaattcacttttagctacaaaattgggtatgtattttacctttttttcattaataccgtattttactagtttatcaataaagatcgggttgactactactatttgatccattcttttataaaaatcaattacatatttataaaaaatattttttgctggcccaggtagtttaacagaaccctccaaggtttccggtaaaaaatgtacatatccaattttcctacctctactaggtaaaaagctgttagcaaaatatgtaggattaattgtatgataatgtgttaaatcacttgttccatatttattgatagttacataaaattcatctactaatcttgttctaagtaaacgaattagctctttatacgctgatcccacgccttgaccttgaacagagtcagcttgagaaaacatattaattctaatcataatttacctcagtcttttgtttattttgaattacttcttgataaaaagcttctattttacgtgcaaacgtagctgctgacacgtctattaactttttttcttttaaatctttaggtatagtgaattgatttgcttttagataatcaataatttcattcgtcatttcactttttgttgtaaatgtactcccaagctctctattatcaaaaacatgctcagtataatcagtactataaacaacacatttagtaccagcagctagagcctcaatatatgtcaagccctgcgtttcagtatcactagctgatacaaataaatctgccattcgataataattccctacgtcactgtgctcaacactaccagcaaaaatgacataatcttctaatgaaagtcttgcaacttgatcttttaaaggttgcacatctggaccgtctccagcaattacaaattttacatttggttcactttctaaaactgtcggcaatacatccagaatttgatctattttcttttctgcagctacacgactcagagtaaggataactttctgattcgaatctattcctagttcttttcttacatctcgtcgtggattttcattaatagcagtcaaatctactccggtcggaattacccgcataggaatagtaaccccatatcgtgttaatgtttctttaacgcgttcactaggtgcaaccactccatccatattatgcaaataagctttggtaaattgctttacatgatatggtttcagtaaatgtccatttaaaacatagtgcaaataatcttcgtacatagtgtggtacgtatgaatagcgggaatacctaaagaatgtgcaacatattttccaatcatacccattgaaaattctgtttgtgtatgaacaatatcaagctttacttctttggcaattttagtagcctgaaaaagtcctcgaaatgctatccttctatccgtaaaagaaacaaaaggaacgctgctaactctaaaaacattaggttcaatagttccttttcccaaatgagggtctgttgtagtaaaaataaaaacagagtgtccatttttttcaagagcattttttaatgtttggattgaagttgctaccccagaaagctgaggaaaataagtatcggtaaatagcccaatattcatgtaaaatacctccattaaagaccattataaagttagtagaaaggagttgcaattttggataaaaaaaagacgtgagaatcaactcacgtctttttgccagaatgtctgaataaatagcggtgatcggggtcgaaccgatacgtcccaggggacaccagattttgagtctgacgcgtctgccaattccgccacaccgccataaatgaaattaatcagaaaattcaggcgaaggcggtgatcggatttgaaccgatgattagggttttgcagacccgtgccttaccacttggctacaccgccaacctctgatcattaacaaattgggatagttggattcgaaccaacgcatgatgaagtcaaagtccattgccttaccacttggctatatcccaatgttagggcggaatgtggggatcgaacccacgcatgccggatccacaaaccggtgtgttaaccacttcaccaattccgccataatattaaaaacagggatagtaggaattgaacccacactagcggttttggagaccgatgtactacctttatacgatatccctatttaaatggaggccagtggattcgaaccaccgaactcagagagagcggttttacagaccgccgcgtttagccacttcgctaggcctccagaatggcgcgagacggaatcgaaccgccgacacaaggagcttcaatcctttgctctaccaactgagctatcgagccattacggtccctaccggattcggaccggtgatctcctccgtgacagggaggcgtgataaccactacactaagggaccatattgcgggaataggatttgaacctatgaccttcgggttatgagcccgacgagctaccagactgctccatcccgcgatgattaaggaggatgtgggattcggacccacgcgcgggcagaacccgcctgacggttttcaagaccgttcccttcagccggacttgggtaatcctccatttataccatctttaatatggtaatgacccgtacgagatttgaactcatgttaccgccgtgaaagggcggtgtcttaaccacttgaccaacgggtcgttttttaacgtacttattaatcatactctacttataaagtgatgtcaacaagtttttatttttttgatgcgttgttttgtgttactctccgcatcagcaataactatattactaaaaacactcagttgatgcaacccctaatttgaactttttttcttttattgcatttttactctctgttatttaacaaaggtgctacactgagcatatatggaggtatgttatgtctagtaaaagatgtattattgacaataaaagcagcaaaaaactattaaagttagctgatggaaacttaatttgcgaagatcatgcgaaattaacaccttggcaaaaagaagaattaattgaaaaagatgctaatcaagttaatgagtatatagataatctgaccaataaatatttgaccgaacatggagttaaaaatactgaatcatcctataagtctattcttcacaaaactgctgaaagtgatttactagaaggagtttcgccagaagagactttaaaactacaaaactggatcttaattaagcaaaacaatgaaattattcgtttacttaaagatttaaaaactaaaaataaataaattatttttatagtgagattatcctactaaatcttcagattgatgaaatccttgatttagcgggatttttatttttagcaaaaatctaaatctaaagtcaactaaaaatgatctttttctcaagatgctttgattaagctctaaatatactgactaacatacttttaaaaagacatatataactaatttagggttttgctttagtttttagaaactgtcaaattttttgtgtaaatagatctttctcgtaaattgtttttttaacgttttatttattcaaaataggattctaaggtatcctggacttgaccaaagcctttgtgaattcggttgaagtagcggtcattgtagctcattgcttggatgccaataaaagtatcaagcgactgttcagtcgggaactccgctttaggcttagccttgcgcttaatgacgttattaaaggattcgatcatgttggtagagtaaattgaagccctgatctgcttaggataattataaaaaacaagcaggtctggctcgatgtctttcaggtttctaatgacacgattgtagctcttgttccatttggcataaaaagcatgcaatacatcaacagcagccgctttattggcttgctggtgaatctgcttgaattcgttcatgattgcctcgcgatcgtccacgcgtactttagcgcagatgttgcgcataacatggaccaagcagcgttggaaatgagcttgaggataggtctttgccagtgctgctttcatgccgacaacgccatctgaaaggaaaagctctacttgctttaaaccacgagatttcatgttctggagcaacgccgtccagacttcaatattctcactaggcgcaatgcagtagtcgataacttccttgtgaccattaggcttgatgccaatggcaatatatactgcttctcgttcaaaagtttctcgacgcaacggtatatacgttgtatcaagataaacacaaaagaacttatcgctcagcttacgcttgtgataagcctcaactttaggaatcatttgcttagagatattagacacttgagctggactataatgactgccatacattttttcgatcaaattagctatttctctagtggttacacctttagaataaagctttataaccatatcttctaagagatcagtatgttgtttatagtctggcagagtgtgttgatgaaacataccattgcgatctcgtggcacttgtacctcaattgatccaaactgggtatcaattttacggaaatacgcaccatttctagaattaccagtattccagccatttctagcatagggatcatatcctaaaaaggcagtcagttcagattctaacatgtcattaacagcttgttggatttcatgacgaagcaaatcattaattttatcttgattgaatagagcttgagttatatttttggtaaaatcattcatgaaggagttcttctttctgtatgtttttttgttcaaaccaatcatacgagaaaggaactcctttttctaatgttttaggaaattaaattaaggaataattcatccttacacaaactattttacggtctcagtttttaaggtaaatatactcaaaatatgcagaatttttctaataattaaattcatccttatacaaaaatcgatactatcacatgcataatctctttttcttgaaataaaaaaagtacattggaaattccaatgtacttaatgcaaagcggagattgagagattcgaaccctcgcgccggtataaaccgacctacacccttagcaggggcgcctcttcagccacttgagtaaatctccaatgggcctaaatggacttgaaccatcgacctcacgcttatcaggcgtgcgctctaaccagctgagctataggccccttttcctttgaagcgggtaacgagaatcggactcgcgactaaagcttggaaggctttcgttttaccactaaactatacccgcaacttcttgcttcctaatggcgcgagacggaatcgaaccgccgacacaaggagcttcaatcctttgctctaccaactgagctatcgagccattacggtccctaccggattcggaccggtgatctcctccgtgacagggaggcgtgataacccctacaccaagggaccatattgcgggaacaggatttgaacctatgaccttcgggttatgagcccgacgagctaccagactgctccatcccgcgatgtttttatataaaaaaagccaagatcctatggaccttgtaggactcgaacctacgacccgacggttatgagccgtctgctctaaccaactgagctaaaggtccaagcttacctctatagcggcgggggggatcgaaccctcgacctcccgggtatgaaccggacgctctagccagctgagctacaccgccatcctgtaacttcctttttaagctacaatcgggaagacaggattcgaacctgcgaccccctggtcccaaaccaggtgctctaccaaactgagccacttcccgaagtgtgcaccctgaaggatttgaaccttcaaccttctgattcgtagtcagacactctatccagttgcgctaagggtgcatcattatatgccgaggaccggaatcgaaccggtacggttgtcaccaaccgcgggattttaagtcccgtgcgtctgccagttccgccaccccggcatgataatgataagcggaagacgggattcgaacccgcgacccccaccatggcaaggtgatgttctaccactgaactacttccgcattttttattcaatttttatgccgattaaaggactcgaaccttcgaccccctgtttacaagacagatgctctaccaactgagctaaatcggcatggtacgggtggtgggacttgaacccacacgtccgaaaacactagaacctaaatctagcgcgtctgccaattccgccacacccgcttgagtttttctgggccaatgagtcgtggcaggctcgaactgccgaccctctgattaaaagtcagatgctctaccaactgagctaacgactcaatggaggatacagggctcgaacctgtgacctcctgcttgtaaggcagatgctctcccagctgagctaatcctccatttagcacggcgactgcctaccctcgcaggcagtttcccaccaactactctcggcgttaagaagcttaacttctgtgttcggcatgggaacaggtgtatccttcttgccatcgccaccgtactctttctgagcttttacactcaaaactgaatataatcttccgctctaaacctttgagctttggtcaagtgctcgactgattagtactagtccgctccacatatcgctatgcttccactcctagcctatctacctcatcgtctttaaggtgtcttactgcttacgcatcggaaatctcatcttgaggggggcttcgcacttagatgctttcagcgcttatcccttccatacatagctacccagcgatgcctttggcaagacaactggtacaccagcggtatgtccatcccggtcctctcgtactaaggacagctcctctcaaatttcctacgcccacgacggatagggaccgaactgtctcacgacgttctgaacccagctcgcgtgccgctttaatgggcgaacagcccaacccttgggaccgacttcagccccaggatgcgacgagccgacatcgaggtgccaaacctccccgtcgatgtgaactcttgggggagataagcctgttatccccagggtagcttttatccgttgagtgatggcctttccatgcagtaccaccagatcactaagcccgactttcgtccctgctcgaggtgtacctctcgcagtcaagctcccttatacctttacactctgcgaatgatttccaaccattctgagggaacctttgggcgcctccgttacattttaggaggcgaccgccccagtcaaactgcccacctgacactgtcctccagaacgctcagctctgcgagttagaggatccatcaaacaagagtagtatcccaacattgcctccagtaagactagcgtcctactttctctggctcctacctatcctgtacatgtttaacaaatactcaatatcaagctacagtaaagctccatggggtctttccgtcctgtcgcgggtaacccgcatcttcacgggtattataatttcaccgagtctctcgttgagacagtgcccaaatcattacacctttcgtgcaggtcggaacttacccgacaaggaatttcgctaccttaggaccgttatagttacggccgccgtttactggggcttcaattcaaaccttcgcttgcgctaagctctcctcttaaccttccagcaccgggcaggtgtcagcacctatacgtcatcttacgattttgcagatacctgtgtttttgataaacagttgtttgggcctattcactgcggctgatcttttaccatcagcaccccttctcccgaagttacggggtcattttgccgagttccttaacgagagttctctcgctcacctgagtgttctccactcgactacctgtgtcggtttgcggtacgggtaaaattgctctggctagaagcttttcttggcagtgtgacatcatgaccttcgctactttgatttcactccgcgtcacagcttgaaatctaaaaataagcatttgactcatcttttttcttactgcttgcacatgtttttccagctacatgcgtcattagcctcctgcgtccctcctttgctcttatcgaacaatttcagtacaggaatctctacctgttgtccatcggctacgcctctcggccttaccttaggtcccgacttaccctgggcggacgagcctgccccaggaaaccttagtctttcggcggataggattctcacctatctttcgctactcataccggcattctcacttctaagcgctccattagtcctctcgatctaacttcgccgctcttagaacgctctcctaccacgcatatcctttgatatgcatccacagtttcggtactatgcttagccccggtacattttcggcgcagcgtcactcgactagtgagctattacgcactctttaaatggtggctgcttctaagccaacatcctagttgtctacgcaactccacatccttttccacttagcatagatttggggaccttaactggtgatctgggctgtttccctttcgactacggatcttatcactcgcagtctgactcccgtgcattgatatctggcattcggagtttatctggattcagtaacccctgacgggcccctagtccaaacagcgctctacctccattatcattcacacgaggctagccctaaagctatttcggagagaaccagctatctccaagttcgtttggaatttcaccgctacccacaactcatccccgcgatttttaactcacgtgggttcggtcctccagcgtgttttaccacgccttcaacctggtcatgggtaggtcacttggtttcgggtctacgtcatgatactctctcgccctcttcagactcgctttcgctccggctccgtcttttctgacttaaccttgcaccataacgtaactcgccggttcattctacaaaaggcacgccattacactttaatgtgctttgactacttgtaggcacacggtttcaggttctctttcactccccttccggggttcttttcacctttccctcacggtactggttcactatcggtcactagttagtatttagccttgcgagatggtcctcgcggtttcaatcgggattcctcgtgtcccgacctactcaggatcctgctaagtctctctgcaatttcgcttacggggctctcaccctctctggcttatctttccagataattctgctatcgcttcaagtactttattgcagtcctactaccccaactggcaagccagctggtttgggctctttcctgttcgctcgccgctacttgggaaatcgatttttctttctcttcctgcagctacttagatgtttcagttcactgcgtcttccttcaacagccttaacagctcttgataatacctcgcggtattgggttcccccattcggatatctccggatcatcgcttacttactgctccccgaagcctttcgtggttcgtcacgtccttcatcggcttctagtgcctaggcattcaccatgcgcccttttctacttgacctatttcaagttgagtttctctctcttctcggtcgctcttcaatctgttttttcgattgtctcggttttttgctttagattatattcagttttcaatgtactagctctctgaggtattaccctcaaaactaaacaaagtttctcagtgtgcttccgcttggctttctcgatgacttctctttagtgctctcacactctccatcatctttcgccttccttagaaaggaggtgatccagccgcaggttctcctacggctaccttgttacgacttcaccctaatcatctgtcctaccttagacggctgactcctataaaggttatcccaccggctttgggtgttacagactctcatggtgtgacgggcggtgtgtacaaggcccgggaacgtattcaccgcggcgtgctgatccgcgattactagcgattccagcttcgtgtaggcgagttgcagcctacagtccgaactgagaacggctttcagagatccgcttgccttcgcaggttcgcttctcgttgtaccgtccattgtagcacgtgtgtagcccaggtcataaggggcatgatgacttgacgtcatccccaccttcctccggtttgtcaccggcagtctcattagagtgcccaacttaatgatggcaactaatgacaagggttgcgctcgttgcgggacttaacccaacatctcacgacacgagctgacgacagccatgcaccacctgtctcagcgtccccgaagggaactcctaatctcttaggtttgcactggatgtcaagacctggtaaggttcttcgcgttgcttcgaattaaaccacatgctccaccgcttgtgcgggcccccgtcaattcctttgagtttcaaccttgcggtcgtactccccaggcggagtgcttaatgcgttagctgcagcactgagaggcggaaacctcccaacacttagcactcatcgtttacggcatggactaccagggtatctaatcctgttcgctacccatgctttcgagcctcagcgtcagttgcagaccagagagccgccttcgccactggtgttcttccatatatctacgcattccaccgctacacatggagttccactctcctcttctgcactcaagttcaacagtttctgatgcaattctccggttgagccgaaggctttcacatcagacttattgaaccgcctgcactcgctttacgcccaataaatccggacaacgcttgccacctacgtattaccgcggctgctggcacgtagttagccgtgactttctaagtaattaccgtcaaataaaggccagttactacctctatctttcttcactaccaacagagctttacgagccgaaacccttcttcactcacgcggcgttgctccatcagacttgcgtccattgtggaagattccctactgctgcctcccgtaggagtttgggccgtgtctcagtcccaatgtggccgatcagtctctcaactcggctatgcatcattgccttggtaagccgttgccttaccaactagctaatgcaccgcaggtccatccaagagtgatagcagaaccatcttttaaactctagacatgcgtctagtgttgttatccggtattagcatctgtttccaggtgttatcccagtctcttgggcaggttacccacgtgttactcacccgtccgccgctcgcttgtatctagtttcatctggtgcaagcaccaaattcatctaggcaagctcgctcgacttgcatgtattaggcacgccgccagcgttcgtcctgagccaggatcaaactctcattttccttcttgaaaatgagctttttatcgtttagctctaaaactttctttgagttatctcaaatttattgcttgcgaattgacttcgcttttgtttgggattttttatatcccgcacactttcagcgaaactttgttcagttttcaaggtactaccgttgccgtgtgacaacttttatattatatcatgtctcttgagctttgacaagttatttttcttgtccctcatctttctcaaatgacagctttataatattattatctttctgctcccttgacaagctctttgcttggcttcctgcctctgcttcgcgctcgcctcaaacagcatgtattactttacagacttttctccttttcgtcaacccttttttctaaaaattagcaatattttttttgagtgctaatctagtgctatcttatcctatgtcaaataaaaaatggtattcccacatcttttgatgtttgaataccatttccttttatatttaaattttattcaccaaattttggttctttagtaattactttcataccatgcatgtatggttgtaatgcttcgggtacgtttacagttccatcttcattttggtaattttctaaaatagctgctacagttctacctacagctagacctgatccattcaaagtatgagctaaatgaagcttaccattttcatcacgataacgaattaagctacgacgagcttggaaatctgtacagtttgaacagcttgaaatttcacgatatttatcttgagctggcatccatacttcaaggtcataagttttagcactagtaaaacttgcatccccagttgaaagggcaacaacatgatatggtaagccgagcttttgaagtaaatgttcagcattatgcgttaatttttccaattcatcccatgaactgtcttcatcaacaatttttaccatttcaacttttctaaattcgtgcattctaatcaatccacgagtgtcacgtcctgcagatcccgcttcacttctaaacgctggagagaatgcagtaacattaattggtaattgctttgcatctaaaatcttgccacggaagtagttaactaatggaacttctgcagttggaattaaagttaaatcacgtggcttatcaggatcatcattatcaacaattgtataaacatcttcagtgaatttagggaattgaccagttccttgcatagaagcatcattcaccaagtatggtggaatcacttcagtataaccatctttagtattttcatctaagaagaaatttgaaactgcacgctcaagtaaggcaccagcacctttatagtaaacaaaacgagcgcctgaaaccttagcagcagtatcccagtctaaaatatttaattcagtaccaatttcccagtgaggctttggttcaaaatcaaacttagttggttcattccatttacgaacctcttcgttatagctttcatctggtccaataggatctgaatctgctgggaagttaggtaaacgaagtaaaatatacttttgtttttgagtaaggtcttctacttctttatctaaatccttaatttcttttccgacttcacgcattgccttaatagcatcgcttgcgtcttctttattacgcttagcttgtgcaatttgatcggatacttcattacgcttttgctttaattgctcgctcttagttaaagcctcacgtctttctttatcaatagccactaatttatctaattcttctggctttattccacgtgtagctaatttcttctttgaccagtctaaattctctcgaattacctttatgtctaacatatttcctccttaaaataaaaaaagccaattcatccctcttgctgggacgaatcgacttacacggttcgcggtaccacccaaatttggttaaaaataccacactcaaaaaagcgataacggtgctaaccgtgtagaattacctacccaatactcgaaatctggaaacgactttttactcattcacaccagccatgagctctctgaaattagtcttaggatttcatgtttatctgcattatatcatgccaatcctgtggtgttaacaaataatatttttcttgataattaaaaagcgaagaaaccattgaataatcagttgtataaacatatctaaaacctagtttttttagcaatctttgtgagttttcattagaaacaaaggttccggcccaaatttgattttggtgtaatttttcaaaagcaaaattgattatcagcttcaaagcctctgtcattaatccttgatgccaataatttttatctaataaaaagcctaaatcttttgtcatcaataaaccgttatattcatctaatccacgttcatataactcaactaatcctattaagcgactattttctttcaatactattccataactatatggtctttccctatattgacaaatgcttttttgagcagcatttaaatcttctagatactgataaccagcacttttatgatacacactatcttgtccccacttgagtaatgtgggcgcatcccttgtctcaatttttcttaaaataattcgtttactttcaagcattacttgcctactaactttactaaccatttagcgccataaactaatcccaagctataagctgcaattgtccaaggttttcctaataaaattatccataaatatgtcgaaaatttcatttcagttaaaccagctatcatacaaagaatatcgtctggcgccattggcgcaataatacacaaagcaaagaaccaattaaattttttctgatttgctgtccacttcatgtatttttcatatgttttttcagaaaccaaatgcaaaataaacggacgaccataatgtctagctaaaaagaataaaatgatcgagcccagacaaattcctacatagttataaataaatccccagattggtccaaagaagataactccacccagcaatgaaactccacccggaataataggaatcacaacttgaattatttgaattaaagtaaaaatcaaggggccaatgatctgtttatttgccaaataagccttcattttttcctggcttgtgaaaattcctaacctataccaataaatacttagtaaaactaggataattgtagtaacaatcgtcaaaatattgattaatttacgactcgttttagtagacatttttctgccctccttggtattttaaattaatgataacaaaaacaagacaaaataggcgatttaaccgatgaaataaacttaaatataggatgaataagatatgacttatcgttgacatttattctataatattagtgtgctataaaataactaagaggcttaattatggttgttataaaaaaagacacaatttacgacgaaactaacaatttgaagacagacatttattttcctaacaatactaattcacaaaccaaaattctaatcttctggcatggtgggggctggtttgctggctcaaaaaatgatgttaaggatcttggaataaaattagcaaatgcaggctttatgactctcatccctgactatcgcttggctccagactttacttttccggctgctcatcaagacagcaaaaaatttgtgaaatggttactagagtcaaattataccgatgaagacgatcaacaaaatatcgtacaaattggtgctagtgttggtggtactttagctatctatattgctggactatatggttttcctactgtaacttggtcagcatctgtagacttttctaattggatgaaaaatcaccctaacgttattccttcaagatatggagctaacgaattaaagcttactaatttacatgatatttttgaatcattttataagttctttgtattgacgtacgcaggtaaagataatcaaactatttacaaacaaatggatgcagaaaattatgatcttagcaatttaggacgcttaaaaatgatcaattctgcccacgaacttgttccattaaacggaattttaaaatttgtcgactttttggctaatcatgatcatgaaattgaattattgattatcaaaggtaagcgccatgcaatggactatgccaaggactacttggatgaatctttagattttctttttcagacaatcaaggagtaaaagaatgattaatattaacaaatttatttccattcgcaaaaaattaggtttatcgcagactgaattatgcaatggcatttgtacccaatctacattaagtaaatttgaaaataatggtcgtattccgtctttaaagattttaaatagtctctgcgaccgttttaatattaacgtagcagatattatggatgcagattctaataaaaaaacatctcataaactatttgaagccgattttgctgtcattcagcttgattttccaaaagtagctcaaattttagctagcattaataaagatgagttaacacgtcaagaagacgtccttcattatttctatctacgtggtcttcttgccttaaatcttgatcatgctgagactgatgctctgtattacttcaattcaattcttgatgcaaacctgtcaaaacagaataagatctatcatcttcttgcacttaaaggttgtagtcaagtctatgatttacaaaatgatgttgacaaagctcgccattactatgacatcatcctttcctcaatatccaatgttcagctcgatgatgaagactcactactacaatttctttctattttatgtaatggcggcgaattttatggccgaaaccaagattatgaacagtcaaacaaactattagagatgggatatgatttatgcaaaaaacgtcatgtaatttattttaccgctcgcatcctttttcaattagctcaaaataatattgcagaaaatggctcacaagaacggactactcaatatttaaacgattcagccgcttttgctcgtttaaacaataatcatgtattattagaaaaaattagtaaacttgcgtaaattaaatcacttcttttatgtcttactaaaaagaagtgatttttatatacatctaagagaaagcgctttataataaaaatatattgaaaagaggaaattttatgtctaaatatgaatctattaatccatatactaatcagctgattaagagttacccagatgctactcaagaagagattgagcaagcacttgatgctggagaaaaattatacttaacttggcgtaatcagcttcctgctactagaagtcaattacttcaccaaatagccaataatttcaaaaagcatcgtgaagaaatagctaaaactatgactttagaaatgggaaagctatatcacgaatcacttgaagaagtagacttatgtatcaatatttgtaattactatgctgaaaaagctcctaaaatgctagagcctactccgctagaaacaagtttagggactgcgtactacttaaagcaatcaacaggtattatcatggcttgcgagccttggaattttccactttatcaagtaattagagtatttgcccctaacttcatggtcggaaatcccatcatcttaaaacatgcacataacgttccagcttcagctcaattaacagaaaagatcattcaagaagctggtgctccaaaagcaagtttgcaaaacttatttttatcttatgcccaaattggtgacgtaattgctgacaaacgtattcaaggagttgctgttacaggttcagaacgtggcggaagtagcgttgctgaagcagccggcaaaaatattaaaaaatcgacaatggaattaggtggaaatgccccatttattgttttagctgatgctgattctacggtattaaaaaatgtactaagtgaggctagaacttataattgtggtcaagtctgcacttcttctaaacgaattattgttgttgaatcacgctacgacgaagtaatggatattttgcatcatacttttgctagtcttaaaccaggtaatccattagatgagaatacaagtcttgcaccaatgaattctcaaaaagcagctgataaattagctgcacaagtcaaaaaaggaattgaacatggagcagaagttgtctatcaatatccagaaattaaaagtaccggtgcattcttccgtccaatgattttaaccaatattgatcaaaacaatccattatttgacgaagaactatttgggccagtggctgaagtatttaaggttaaagatgaagaaacagcaattgcactagccaataattcaagctttggcttaggttcaagcgttatttctgaaaataaagctcatgctcaagaagtagctagtgaaattgaaactgggatgacagtaatcaacggacgctggattacagccccagaattaccatttggcggagttaaaaaatctggttatggtcgtgaattgagcgaactaggtttaatgtcatttgtaaatgagcacttagtgattgatgtttcaaaataattttctaaacatataaaaaaagaattggatcagatgatgacccaattctttttaattttgtctcatactgcgaaatgcaacaactgttaaaagaatacttgatacaaataataagtatgtagaaacaccaaatgagattgcattcgctacaatcctctgaatttcaacactatttgctgctgcattattagtaattcctaaggatgaaccagcattcataaagattaattcaatagcacaaattactaagacgattgattcgattaaagaaaggaagaaaacgattctcttattatttttaccattcctaattgtcaaaataataattgcaattggtactccaactaaaagaagccacattccataaccaatcaaaagatacttaccattaaatctaccaattgaaagtaaggcttttgaaatagatagagtttgatatccttgcatcattcctgaagagaatggaccactaaatacaagtagcaaatttaaaactgcaattaagactactcccaattgagttgccgttctcttttgtttaacaaccttttttattgcttctggatcacgccccaatttattgtcaatcttctgtcggtgagcttttacacgattctccccttcttcaaaagaattaaccacatcagaaccaaccttattaacatgctcagttaatcgctgatcaacagtgtactgttctgttactttgcctttatttttatcacaaactataaacaaccagattaacagtgcaaagaaacaagaccaccctaatgatggtgaaaaactagtcaaaatcaacaaaataattccaacaacaaagacaatcattgaatttacttgaatccaattaatcatgctagcaattgtagaattttgcttttttggctcaatctttttaacagaacgtgtttcttgcttttgacgattatcagagccttcattacgagttggattctgcccagtaaaaaactcatttctaaatttttctaaatcaaaatgacagttaggacactgcttatcagtcggctttacatcttcaccacaatttggacatttcattttttattccctcataaacttttttagcttattatagcatttcaagcaattaaactaaaaagcagagactgcttacgctgttctctgcttttttctagatgccattcttactaatagccaagcaataataaatagaattgcaataccaattaaggacccaattagttttttagcatccccattaaagattgcatctccgccaaaagcatatataaaagatgtaggaaacatccccacaattactattaacaaaaacttatttgctggcacatttaatctagctgcagtgtagtcaactaacacactcggtattactggcaccatgaagcctagtgtcattcccaagcttggatgtttttgtgccattagccaatttaaaaacttgtttttcttaaatcgatgggaaaaatcaactcttttaattaaactctctacaatacaatttcctaaaatattgccagcccagttaattgctaatccaatccaaggtccgtagcaaagacccgctaaaatacaaaaaactgaatttgacataccaggaatagcattcagaactgttattagtcctaataaaaataggctatcacgtacttcatgctggcgaattaagtagagtaattttgttttagtatgactatcaggatgcattaaaacatcaatttcaggacgatagtctcggtaaagtaaatagagtaaaatgattgcggataagattccgcaggcgataaatattacttttctcaatttttttgtcataatttcactcatctatttcaattatacatagttattaactatattttttcattatttaatataataagcaaaagcgatccgtgctcattggttcttatctttatcgtattataataagatagataaagccattaaaggagaaaatttttatgacagcaaaactcatttttagtgatattgacggcacgctgatcacatcggatggtaatgtctcgtctaacactatcgacgccatccgtaaacaaattatcgctggtaacttattcattcccgtctctgctcgcatgcccaaaggaattatgaatgtcgtagataaaatcaccaacttctgtcctattattgcctataacggtgcgctagtgttagatgaaacgggaagacctcttaattctcaattttttgatgctgcagaagcagtccaattaattactaaattagatgctcttaaaacagaagatcttgcttggaatgtttacagcggctacaactggttttcttcacttaataagaatccattagttaaaaaagaagaaaaaatagttggagttaaatcacttccggtttctctagaccgaataaaagaattaaaaggcgttcacaagatgctaatcattggaaaacccgacacaattgataaaatcatccctacactccaatctaattttcctaaacttgcttttgttaaatctgcaccccatcttttagaaattatgcttaaaggtgttaataaaggaaaagcagttaaaattgttcttgatagctttgcaatagataaagcgagtgcttgggcttttggtgataattataacgatgagccaatgcttgaagctgttgggcatccaattttaatgggtaatgcaccagaagagctaaagaagaaattaaatattcctgtaactttagacaataatcatgacggtattgcagctgtcttaaataaaatatctaattaatttatataaagaaaaaagattgaagttttatcctaatcaaaaatagagaccgtaaaatagtttgtgtaaggatgaattattccttaatttaatttcctaaaacattagaaaaaggagttcctttctcgtatgattggtttgaacaaaaaaacatacagaaagaagaactccttcatgaatgattttaccaaaaatataactcaagctctattcaatcaagataaaattaatgatttgcttcgtcatgaaatccaacaagctgttaatgacatgttagaatctgaactgactgcctttttaggatatgatccctatgctagaaatggctggaatactggtaattctagaaatggtgcgtatttccgtaaaattgatacccagtttggatcaattgaggtacaagtgccacgagatcgcaatggtatgtttcatcaacacactctgccagactataaacaacatactgatctcttagaagatatggttataaagctttattctaaaggtgtaaccactagagaaatagctaatttgatcgaaaaaatgtatggcagtcattatagtccagctcaagtgtctaatatctctaagcaaatgattcctaaagttgaggcttatcacaagcgtaagctgagcgataagttcttttgtgtttatcttgatacaacgtatataccgttgcgtcgagaaacttttgaacgagaagcagtatatattgccattggcatcaagcctaatggtcacaaggaagttatcgactactgcattgcgcctagtgagaatattgaagtctggacggcgttgctccagaacatgaaatctcgtggtttaaagcaagtagagcttttcctttcagatggcgttgtcggcatgaaagcagcactggcaaagacctatcctcaagctcatttccaacgctgcttggtccatgttatgcgcaacatctgcgctaaagtacgcgtggacgatcgcgaggcaatcatgaacgaattcaagcagattcaccagcaagccaataaagcggctgctgttgatgtattgcatgctttttatgccaaatggaacaagagctacaatcgtgtcattagaaacctgaaagacatcgagccagacctgcttgttttttataattatcctaagcagatcagggcttcaatttactctaccaacatgatcgaatcctttaataacgtcattaagcgcaaggctaagcctaaagcggagttcccgactgaacagtcgcttgatacttttattggcatccaagcaatgagctacaatgaccgctacttcaaccgaattcacaaaggctttggtcaagtccaggataccttagaatcctattttgaataaataaaacgttaaaaaaacaatttacgagaaagatctatttacacaaaaaatttgacagtttccaaaaataggataaacttcaatcttttatttttagaatattaaatactagtcagtatcttttttattcttttttctgcctaatccttcatatgtaatcttcattgcagcggacatattaattggaagtaagaataccaagagtaataatccaatatccacacataatgcaacttcgattaaagttggaacacctgatggaattaaggctgcgaaagtacctccaaggataatagcagctgaaattactacagttccgattatgtcacaagcttgaagcatcttctcgcttgtagtccagcctgggtttacttctcctaattcacgataacgcatcatcaagaagattgagtagtcaacacctaaggcaacgatcatgataaagctaaagaatggagtgttccaagctaataatgatctgcctaataaggcatggactaaccattggttgatagatagagaagttaagtaagcaattactaaagtacctaagataaataatggttgcaagactgatctagtaacaaagatcaaagcaattccgatacctaccaacataataattgcagttcttaagaagtcgctgcttgcagtttcttgagtatcgtaaatcttttcggattgtccacccatagcaatagttgagctttgaaggctggtacccttcactgacttcttaaccatgttgctgagttcatgagctttctttgccccttcagttgaagctgggtctaatttcaagataatgataatcttagtagacttcaaatcagaactcatgtagttatcaagagctggtttaaaggttgatgaatgaatcatcttagctgggatgtagaaagtcttacctgcagctgaatctgctaaaccagtcaagtattcttgaccttcacctaaaccgctatttactttatcaattccagcagtaatctttggattatttgatgcaatttgaccggcaccatttgctaattgacttgcaccgccattaagttgaccaataccgtttgctaattgaccagatccaccgttaagttgaccagcaccacttgctaattggccggcaccaccgtttagttgatctataccattagctaattggttagttccgcttaggccagcttgtaagccagtattcaattgaccagcaccgtttgctaattggcctgcaccgtttgcaagttgactagaaccagatacaccagcttgtaaacctgttgcaagttggccggcaccgttgtttaagcgagctgcgccgtcgtttaagcgactcgctcctgctgcaccttgagcaacagcactttgaacttgagttaatcctgaacttaattgattcaaagcagtcgtagcacctggtaaagctttatttgatgcatttgctaaagtatttacttcttgttttaatgttgctacttggctcatcataccttgtaggttttgcaaagtagccccaacactacttgctgattgaccaagtttcttatctgcttcaccagctgcttgaatattaccagctacactcttcaagcttgaagtaagagcttgagatttttgactagaagcagattcgactttacctaaaatctgattaagagctacactcattgcttgcttttgttggtcattcaacttagcactatccatagcctgagcataagcttgagttaattcagccttttcactatcactaagaccagtggcgccagagctttgtaatccctttaaagtattaccagcctgagtcaaattatctccaatagtttttgcttgtgtaccaacatcggttaagctagctcgtaaacttgctgtatcaactgaatttgacttacctaaagcctgatttagtttttgaataccactattaatcttaggtagtccttgttgcaatgctaataattgagctttattagcattactcatttgaccagataattgagcactcatagtattcaagccgtctactaacgcttgagtaccgtcttgtaaactagcagtaccactttgtaagcttacagcaccattcactaacttaatcgtaccgttctcaagttgcaccgcaccttgttgtaagttcaaagtaccactctctaaacgaccagcgccagttgctaactgcatagttccagctctaagtgcattagctccagtttgcaaacgattagttccacttgctaattgatttgcaccagtttgtaaacgtccagcaccagcttgcaactgatttgcaccactttgaagacggccagtaccattagaaagttgatttgcaccattctgtaattgaacagcaccattagtgatttgcttgctaccgttacttaaagtgcccaaaccatttctagctgtattaacacctgaattaacagttcctaactgattatcaacgtaaagacgtttaatagacttaccatttggttcagttactgatgaagcaaattttacatctggatcagcttgaatcttcttaacaagctgatcaatttctttcaagctcttttcattatcgagcttatgaccactttgaatatataaggttgagtattctggcgtaccttcagagaagtgatcttgtaataatagcaaaccagcctttgaaggagtagagtcagaaatttcatctgcatcgttatagttcaagttatttgaatagaataagcagaatggtaaaaccacaaccgccatcacaactaagtaaataattggatgagttaagcttcccttagaaagagcgtgccataatttagaattactttcgccttcaaaattcttaactggccagaataatttcttacctaaaacagccataaagaatgggtttaaagtcaaaagtacaactaataaaacagcaacaccaacagcaacgccaacagctgattggtaaattgagaatttagctagtcctaaagcactaaatccaattaaaattgaagatccagaataaagaatggtcttaccagctttacgcaaggcatcatttgtcgcatcgtggttcgacatccccttactcaagttctatttaaacttatcatacagcaggatattgtagtcggtcccaataccaaatagaacaataaccatgaagacttgagtaaagtttgaaaatggaaagttaaacttctctactaaattagtaacaattgaaaatgaagtaataaatgaaactccaactgtcaataatgaaattattggtacaattggtgacttaaatacaattactaaaacaataaaaataaagaagatagtaattaattcagtctttttaataccttcctgaactgaagccgagaagtcatcttcaagaattcttaccccagttacatacgttctaattccagacgttttaactgctttagttaaggccttattaacattagatacagttgaatgatcatttgcaatattcaattgcacaatttcagttgttttatcttttgaaattaattgtgcttttgcagcgtaattatcattcggggtcatcattgacttaatacccagctttttcttattatctttcaaaaagcgaatggtattatcaattttctccttatcacttgaggttaattttccatgttttttgttaaaaacaacccctacaacataagtattatcttgcccgtgtccccacttactttcgatgtttgtcgcaattgagctttgaacatcttcaggcagtgaaatttccgaatgctgacgcgttaaagcatctacatctggcaatgaaaagatcgcaatcagtagaattgcaatccacgctaccaaagcaccaagatggtttttcagtaatttcatgtatactttcctttcctctattttgtaccttcaacttgaagttttggcgctacaagtcgcaaaagcatctcatggtaattatcatcagcttctttttctgtttcatcgatcacataacgatctaaaaaaacatatcccaagactgctcccagcaaactgtgcagggaaacgatattcttattatctacatcaagtttttctcctagttctactatcttcataacttcttcgtgaatttgttcattttgaacatattcatttaatccacagtaaattccagaaattgctttatcatgtagcaaaaaatctcgtatctcatctgcaaatctaaacaaagcatctaagcctgaatgacctattacctttttcattaaatactggcgcaaaacttgtagtctgttcacacaaactaaaactaatagatcattacggttagcaacataatgatataaagactgagatctaatgcctaatgcctttgctaaggctggcattgttaattcacttagtcccttatcactaatgattgctattgcttgatcaattacttttgagcggtctaaagctctttttttagccaagataatcaccttctttttgtgtactcatatactttaacacgacaacctgtagaaaacaatctacaacgtgtagaaatttatctacttttttagcaaaaagaaaaaggagctataaaactccttcaacacagttatttttgtttaattatccaattattaatcgcatccccaattttagctaaatcagcatcttcctcgctaaccattgccattgcatatgttttgccgttttcctgaattaaggctgcaccctgttttttatcagctattttataaacaacaccattaatatttttagctaatcctttctcaggaaaattagctaattgacctaaaatttgattatcaatatcagtgcctaacacttttccctgatatagtttctgcatagttgtaactaaatcattgctacttgttttcccggcaaaatccttaccaaaattttctgtaatttcagtcttgcttgcgccaaatgcttttgcagtttcatttactttgtcttttccaattttatttaagatgatattagctgcattattattctgctgccgcatcattaaatctagcaagtaagtataagaataggccatatcagccttcaatactttatctccaccgtttaaatcacttgatttaactttatatggattagcagaatttaagcttttgtcttgaactgccttgtaataagcaagtaagacatataatttcaagacgctacctgcatttaaactatcttgactagtattagttaaatcggcaaaaaccttagtactattcaagtcttttacgcttatttgataatttccttgaacgtttgaacttgccttaacaatagccttagctaattttttattactattttttgaaatagcagcttcgccaatctcgctttctccattagttaaacgagtctgcttactgccttctttcattttacttttttgagctactttcgctgtcgagtttccgtatatctccaaagtttgcgtcttcatatgatttatgcttgtcatataaaaagctaaagcacaaaaggatgacaaaattgctcctaaaaagattttattttccattaaaattctccttaattacatatttttattttatcatgctatttagtaaaaatgcttcaaagataaggattaatatatttcttacctatctttttatttaagcaggatcagttgaatgcgttcacaaattgatttttttttagtacaataattccagtattaatatttacagtgagggataattaattatgttgaaatatatgattggtattgacgcaggtggtacgcactctacggcaatcgcttatgatgaaaatggtaaagaattaggtcgtgcagaatctggcccaggtcaaatcaacaacgactacgaacttggtattaaaaatatcgctcaagcagttaatgaattgcgtgataagattgatggcgattgtatcaaagttttagccggaatcgctggtttatcagttgttggtaatgctcctgaagttgcagcaaccatttcttcaatggttggtaatattccaactcgtgctattaccgactcacttcttgctctctacaatggtcttgaaggagcagatggtgctttagttattgctggtactggatctgttgttaacggtcgtcaaaatggctctttaattgccgttggtggttacggttccttacttggagatgaaggtagtggctacgctattaccaaggctgcccttcaatctgctcttcttagctgggacaagcgcgaaaagaattctttaattgacttatttgtaaaagaatttaatgttgacaacatgggggaagttcccgctaagttttacagcttgactagtccagaagttgcttcaaaagctgtcaaagttgctaaattagcagatagtggtgacgaagacgctcgtaagattattgccgatcaagctcatcttctagcacgcgacattattatgtgtttagaccgttacgaagatcctaaaccaatgcgtatcgctttaactggttcagttctttcaaataatgctatgatgcgttcttacatggaagctgaagttaaagaaaaatacccagatgcagtatttagcgtttcaaacggtgaaaatgcacgtggcgtaatttttgacaagagtaaagactaccgctacttcactaaccataacgatgatgaataattaaaagttaaaaagacctcggaattctactttccgaggtctttttctgtctataaatctttgtacattaagacgtggtcaatgccagcttcattaaatatacttcccttcacttgatagccaagataatcgtaaaatggcttagctgtcatctgcgcatgacaatataatctatcaactccattttcttttaaataatgatgaacttcctcaaccatcttgcttcctaaatgcattccacgtgcatcttttgaaactactacgcgacctaaataccaagctccgcttttttctttaaaaattcggcaagtagctaatgcattatctttacttttattcaaagtaaaaacatgaaccgcataaaaatcttcatcatctatttctggcactgtgattttttgctcactaacaaaaacttcattccttaatctttcaacacaaaaagcttctcgtcccgtcatttcgttaattgtcttaaaagaaaaaatcatttctttaaccccttaactaaaataaagtctgtttgaggatcatctccaactacaaatgtatgttgactaactctcttaaagccatcttttttataaaaagcctgagcttgataatttttctcccaaacaccaagccacatattagccttgtcttttttcctagccagttcttcagctagttttattaaaaccaagcctaatccctgatgctgaaagccttgtttcaagtaaattctttctacttctaaagcattatccgtcacctgctctgtttgtgcatcaccctcatttacttttaaatagccagctacttgattatttacgattaaaaaataaaagttactgttttggttttcaatttcagctttcaatttttcttctgcataagctttatctaaaaatttttccatattttcagaactattttgcgaaccaaaagtctctgaaaaagtctcgcgcgaaatccgttgtaagtctttaatatcagctactgttacttctttaatttcatatgcttgtgccatcttagtattctctttttccaccattttttacaaagctccaattctcattagcatttttttcaataatccttaaatattttcgcaattcagtttgttcagtgttacttagtccctttatcattagctcatttgaatagatattttctttttctatctcttttgctaactcttcaccactttccgtgacaaaaagatgcttaatttttttattaacctcatcgtctttttttaaaacaaatcctgcctgttcgagttttctaactccacgtgcagtagtggtacgatcaacattcaataatgcagccaatcgatcagaaataattccaggatgttcaaaaattcgaactaaatataagtactgtccccgatttaacctcaaatccttaaattcaatattcgcaattgaatctaatgcccgtgaaattgaaccgatttgtcgtagaatatcctctttttccatgtttactccttttatttttatctagtatattttattattgttgtaaatgcaacaatacaattgatttaatcagttgctttacctactactaataagtaaaatttatctgaatagaattagtaagggagagtacaaaatgattttaagaaatattggagttattctgacgatccttgtcggaatagagcatataggaattatgtggttagaaatattcggaaagccagaattacaagctaagtcatttgacatggatataaattttgttaaacagtctgctgccaaaaccgctttagctaatcaaggtatctacaatggaatgttaggtttattaattctaatcgtatttttcttctttagactgcctactttagtcacggtctggcaattattactagcatttgtcgtagtcgttgctatttttggcggctttacagcaagtaaaaagatttttgttgttcaaatgttaccagcattaattgcttttattctactttccttttaaaagaatccataaaaaaatgaggattgttgtcgtgacagtcctcatttttttaatttaatattctgtttttattgattccaagcactttggaacttagtcttaccagcatcaatctgtgaattccagctttgacccttctttgcttgtgcaaagatgttttgcataattgaattcaattgagtgtatgcggcattactgttcttaactacaggaacactgtataagtgcttcattgctttatctaattgagcaggaactttagtcttagttgagttcttataagcactagaattaattactttattagttacaggaatgtatccagtcttatcagcccaagtcaattgttggtctttacctaacaagtacttaacgtacatgaaggcagctgccttttgttgagcagtacccttgttaaacatgtaaatatcagtaccctgttgcatgttgtacttagaaggacgaggagcaacaccatattggaacttgttaccaacacccatcttaacgaatccttcaccagcactagtacctacaaacatagcaatcttttggttagaaaagtcgcctgaaagatatccagctgaaccagcagtcttaaagtaaccatccttaataccatcagcatagtaattaattactttcttagacttagatccagtaaagttaatatccttagagaagtttacgccttcatctttcatacctaaaacatagtagtttgaaagtgagtcaaatccagcaccaacaactttgtggttactcttttcgtagatcttcttagaagctgcttttaattcagacatagtctttggtactttaacaccgtatttgtctaacaaatccttgttgtaagttaacatttcgacagatttattaaatggaataccgtattgagtccccttaatttgagcaccctttaataattcttcacgaatatcactctttttagctgaaccccaaccaatcttactattattaatgtaaggggtcatatcaactaaacgtttgctgttagcggcatttaatagccagccaggataagcttgagtaattgtaggtaagttatttggtgattgcaaagttgagttaatctttgcttgtaaatcgttgtacttgccttggttttcaagcttaacagtaatgttaggatttttcttttcaaaatccttagtcaagctttgtaaagtcttttcttgagtaccagtcataccatgccagaaaacaacagtagtcttcttggtaatcttagttggaatatcagcagacttactacttgagctatcattacttttagaatttgagcaagcagtagtgccaacaagggctaaagcagcaactgcaactgctgcaaattttttagtgaacttcatatgttcctcccaataaaaacaacaacaaaataaaattttaattttagctaagcgtaaatacctctccgcgcttaggtaaaatccgttctccaaatgggttttcttctaattcaggatgcaatgtgtgcactggagccaaaatttttggctcaaaacccgcaataatttcttttaattcagctacatccgcatgtcctgagcaacgtaacgttattaattcaattccgcgctttttaatattttcaataaacggagcataggctggatcaaaatcccccaaaggctctgcattactgtgaatgtacaagccacctttttgtaactgatcataatgaccaactacttgccagaaatattgatgatcatcctttaaaagatcttgatagctaatttcaaggtcaggatcgagcgcatcaattttttcatcttctggcaagtaataataaggaacatcttgctttaatgctaactttaagagttcagcacgtttagcatgaaggactacttttcgaggtgaatctgaaataattctcaaaattcgctctacatttgtaggataagtattaaaagttaattggcgcttcggattatctttttgatattgaactattctttgcgtcaattcaatttcattcttaacgcctttaaattcttcactatcgtcttcactgcgctctggccatgaaacaccagtaccttcaataattagcatatcacatcctttaccggctgccataaacttacgcacccaatcaggatgatagccatgtaaacgaatatcaccagtgtgaacaattgtcttatctggcgtcttcacaattaaacctgttgccccataagcatcgtggtcacttggtacaactgttaaagttatgtcaccaacatgaattggctcatttaacttagctgcaattattgggcgagtataatttttaggcttatcagccgctggcaataaaaattcgccatcacgatttagcactggcaacaaggctgctgttaatggacctgcatataaaggaatttctggcgctaacaagttcattgccttactgtgatctaagtgaagatgagaaatatatgctgcactgtgttcccaccgttcatgatcaatttcttttcctgtaactttaggatcatagaaatctggcacatcaccaattagttgatacttgagcagagtagcaaaatcttcatcttccatctttaaccctaattctggacgatatacttctcctaaatcaaacaatacatgcgacttatcataggccacttcaatcattgggccaccgatggtagttaatccattataaaaagtaactttggttttaggctttgaggtcattacgtactactcctcgaataatttgctttctaaaaatgaagtaaacaattaaaacaggaacaactgttaaagttgctgctgctaattgtaattgcgtttgagctcctgcatctgacgcaaatgcagctaacccattgtttaataaacgcattttatcttcatttgtaaccagtaatggccataagaatgaattccagccagaaataaaactaagtaaagctacagtaattaaaccacctttagacattggaactaaaattctccaaatatattcccaatcagaagcaccatcgatcatagctgctttataaattgtcggtgaaattgctgtgaagtagctttgtaaatagtacatatagaagattgaagttaaaaatggcaaaactaatcctaaatacgtattcaataagcctaagtgagcaattgtattatagttagtaaaaattattgcctctccaggtaccattaacaatgaaagaaagatcaattggattaatccttttcccttaaactttaaattagtcattgcaaaggcaccaaggattgaagtaaatagagtaacaattgtggttgttgctgctgtgataaaggtattcaaaaagtatcttgcaaatggtgcttgttcgaatactttttgatagttactccacctaaaaaccttaggaatcaaagttggcggaatagtcgtggtttcttgatatgacatcaagccacctaaaatcatataaataaatgggaaaacagttataatgccaaaaattccaatgaataaatagacaaaaatcattccccaacgtaatttcttctgcttcattttaactgttcacctttttcatcaattttctttgtaagaaagttacgaacaatataaataggaacaagaccacagtagcagccatagctacacccggagttccaacaatttggaatttgttataaatgtagtaaactgccgtcattgctgaattacctactccagcttgtccattaaataatgcataaacctgagtatagatcttaaatgctccaattaagtttactgttaaaagaaaagctaaggttggtactagttgaggaacagtaattcgccaaaatttttctttacttgttgcaccatacatatcagccaaaacatagtaattcggttcaatatttcttaacgcacccattaagataacgatattaaaagctaaggatgaccagacaccaaaaataattagtgaaataagacttaagctaggattatctaaccaatctggttgcggtaaatgaacaagttttaataagaaattcaataaaccatattcaccattgaagatataacgaaaaacaattccgattgcaattgtactagtaacgtatggcataaagaacattgtttcaaagaaagccgtatgcttaatttttgaaaaaataaaccaagcaagggcaacagaaattactaaagcaattggaacagctaaaaatgaatagatagctgtattcataattgcacgccaaaattctggatcactaaaaatatattgatagttagagaagccattaaaatgtagatcaattaatggaccaccctgaaaactcatcgtaaaggcacgcaaaatcggccagatgctaaatacagtaacgcaaacaattgccggtgctaagaataaccaagcttttttctgattatctttcattaatagattcgctccccatctggcttaaataagtaaatacgatctaaattcatcttaaatttaactttatctccgcgttttacttcttgctctaaatcaattaatgcacgttgactaattccagcatgattaaacttcaatacacgctcgcgtccaattaactctatatcatcaattacttcagaaagttcgccttcatcagctagcttcaagttttctggacgaatacttaatgtataatcaccatctgctaattcacttctaaattttgaactatttaattttgcaactggaatttcaaaatctgaaccaacaatctgatcatttgctaccttaacatcaaagttatcaattactggattaccaataaagttagccacaaattgattatttggttctagataaagatcttgtcccttatcatcttgttgaattacaccattatggaaaagaataatcttatctccgattgataaagcttcttcttgatcatgcgtaacaaataaagttgtaatgccaacttctttaactaaattacgaatctcttcacgaatctttaaacgcaggcgtgcatctaagttgcttagcggttcatccattaataaaatctggggttcttgcactaaagcacgtgcaattgaaacacgttgttgttgaccaccagaaaggttacctggtttttgatcagccaactcttcaatatgagttaacttcataaattttttggcaattctttcagcctcgtctttaggcttcttgttctttccaactgtcattggaaacattacattttgtaagactgtcatatgagggtacaaggcatagttttgaaaaacatagccaatattgcgatctttgggcgcaacattaagaagagacttaccatttacaataatgtctcctccagttggattcaataaacccgcaatcatatttaaagtagtggttttcccacaaccactaggacccaacaaacataccaagtcgcctttctttacggaaaagctaacagatttaattgcttggtaaccattctcataagttttttctaggttatttagctgaatgaatttatcttcgttcatatatctctcactactacatttagatttaaatcatattacaccacaaattttatgataaaagcaacaaaatcacaaatattttttcagtaaataattcgtactttgtgaattttttattgcttttttgtggataagatgtggataataatatcattttaagaacatttctatataaaatatattaataaatcgtattttactacttgtattttttagttttatgttttgtattggttttctcaatatacaaaatagagaaagtcgaacaataaaaaaacactacatcttgtgcagtgttttctcaaaaaattataaattatcgccgcgttcaaattgaaatttagatgtatttaatgcttgtctagttaagtcactaatcagtttcttagtttcagtagtaatatgagcagcagtttcagcattagcagccgttaaatatttagtttgttcttttccagacatttctcttgctttctcatcagttgctgaaacacgacttacagcataactttgacattcatctctaaagttatcaacttggtaaataaattgatgatatcttggttctactaatacttgtaagctcttatataaccaataagcactagattcaggcgtaaccatatgactagctttttgatagttaagtggcgtgtcatcaatattggtatagaaaggtacataaggactataagcataaaaaccaaagttaatccattgaataccagctatttctttaggtacatcatttctaatttgaagaatacaactagattggtttctatctaaagcaattgatctgaacatcttttgcttcttatcatccccagaagcaaaagatcccattggatcatattcagtcccgttatagtgacttgctaagaaatactctacatcttcaacgccaatcttcttttcaggctttctgataaatggcatttcttgacttagaggatcttgttcaacactagggttaaacaacttttggccataccaagttcttggagtgttgtaataactatcagcttcagctttagtaccgaaaatatctctaaaactccacttaccatcagtacttggatttaaatggttcttttccacaaaatcacgaattgtagaagcatacataaaattctcatgatcatcaaagtcgatatcttgaataaccataatattcggacaaattgcataagaatcttctggaattctttgagcaacccattgatggccagcaccagtttcaaaataccaaacttcattgtgatcagaaaaagcgataccgttactttcaccagtaccatatttttcaattaacttacctaagcgttccacaccctcacgagcacttttaacgaatggtaaaacaagatacaccatggaatcttcatcaacaccatttttaactaaaggatcatgtcctaaacagcgagcattggttgcttcagtttcagtagctgacattgctacgttatattcattaattccttgctcatcccagcgaccttctgaagcatctgctgttggtgtagcagtccacttgcagccatgcccctttaagtgaagcttcaagccgttatactttgatacatagtcttcatcatagtccttagcttcatgaacgacaaaaagcttttcattaataccaccataaccatcttcatcacgtgcaatgatagttgaaccatcaattgtagctttttttccgacaatcattgccgtacagttatctttacttttcttcattgttttctcctaaaaattatttattgattaactaccacattacgatctattttagccctaccattattataatcaaacacataatcaggctgcacgttaaaaagataaacattaaagttcaaattattgttcaagcttattgcctgtaaattaataccacgcgccattaattcatttcccctaaaaattggtgttgcttgaaaaataattttatttccttgttttaaagaatttcgaacttttccctcaaaaatagtctggattttttgattagaaaatgcagtttgcgtaaataaatttttcggattattttgatcacctgactgattattaggattatagttaccatcctgatcaattcctgccgaaatcgaataagcaatcaaatgaccacgattatagatttgcgtgccattttctcggttagaatgccatgccgtaggatttataaattgtcttactcttaaagaatcattagccacatttcttggttcgagaaaagcagtatttgaatgagaagtacgatttaaattatctaaattagaatagattaccttgttaactttccaggcatttttaattaacgtggacttattattatttacatagacataagccttgtcgccacttttaaaatccaaattggctagtttttgataatcatcactagataatccaccataattagtattagctgttgtagccttatttactacttgctgagaactacttggttcttgactttgatttgatgtgtggttagaagattgaagcttaaaccaaccaccccaaataataattacaattgctataatccagcttgctactgtatttttttgcttttttctatattttcttctctttgccatttcctattcccctagctttatttctttcagtatagatatttgaacgtatgtttgcaatatgattaataagtttttattcatttagactgctacaataaacatggcaactctatcaaaaatagaaagaagaaaaagaatggaatatttcaatttaaacgatgggaatcgtatccccaaaatcggttttggaacttataaattaaacggttctcgcggcgtttttgctatccaagcagccttaaaaaatggttatcgtctactagattccgccgttaattatgaaaacgagggagctgtagggcgtgccatcaaaaatagtagtgtaaaccgcgacaatatttttataacttctaaattacctgggcgtcatcacaaataccaagaagcacttgaacaaattcaagaatctctttactctgccgacctcgactattatgatctctatctaatccactggccaaatccaaaggaaaaccactaccttgaagcttggcaagccatgattgatgcacaaagattcggcttaattcgctcagtaggagtttctaacttcgaaccagaacatattgaatacttataccgtgaaactggtgttatgccagctgttaaccaaatcgaactgcatccttactggtcaagtaaaaaagttcgtgagtatgataatcaacatcatattattactgaagcttggagtccgcttcagcgtggtggtgaagcctttcaagaaaaagaaattattgaattagcacagaaatatcacaaatctcccgctcaaataatcttacgctgggaaacgcaaatcaatgttgtgccaattccaaaagccagttcttatgagcaccaactaagcaatttagacatttttgatttcaaatcaactcctgaagaagttcaaagcttaattgatttagataaagaatccgcacgccgtttcgatccgaatgagcacgaagaattctaaagaaagcaggtaaaatcttcatgcaagcaattttaaataaacgagtttcaaaaattgctttattttatgatctcgtttttgtctacatgatctctaaaacaactgagatacttcatcattttgagcatggtcttgtttcccctacatcttttgcactatttgcattaattgttattatctttattaattcatggatggttcaaactgtctttactaatcgctatgggataggtagctgggcagacattgctttttatttcattgacatgatgattctgctttacatgtctaactcttttgacacaaacaacctaactgaaatgaaaattttatttatttctgctggtttactttcttttactttagcaagtcattacttaattaattattttcaaactaaaagtgaaattgatcaaaatatttcccgggcattttttctaattttaatttttagatcaattactttaatcattggcggactattagataatattcctggctttgttttagcagtcattggcattatttttagttggttaatgcctattttaaccacaaaatatactattaaacatcctattatttttcctcatttacttgaaagattaaatcttttagtaattattatcttgaaactgtcaaattttttgtgtaaatagatctttctcgtaaattgtttttttaacgttttatttattcaaaataggattctaaggtatcctggacttgaccaaagcctttgtgaattcggttgaagtagcggtcattgtagctcattgcttggatgccaataaaagtatcaagcgactgttcagtcgggaactccgctttaggcttagccttgcgcttaatgacgttattaaaggattcgatcatgttggtagagtaaattgaagccctgatctgcttaggataattataaaaaacaagcaggtctggctcgatgtctttcaggtttctaatgacacgattgtagctcttgttccatttggcataaaaagcatgcaatacatcaacagcagccgctttattggcttgctggtgaatctgcttgaattcgttcatgattgcctcgcgatcgtccacgcgtactttagcgcagatgttgcgcataacatggaccaagcagcgttggaaatgagcttgaggataggtctttgccagtgctgctttcatgccgacaacgccatctgaaaggaaaagctctacttgctttaaaccacgagatttcatgttctggagcaacgccgtccagacttcaatattctcactaggcgcaatgcagtagtcgataacttccttgtgaccattaggcttgatgccaatggcaatatatactgcttctcgttcaaaagtttctcgacgcaacggtatatacgttgtatcaagataaacacaaaagaacttatcgctcagcttacgcttgtgataagcctcaactttaggaatcatttgcttagagatattagacacttgagctggactataatgactgccatacattttttcgatcaaattagctatttctctagtggttacacctttagaatacagctttataaccatatcttctaagagatcagtatgttgtttatagtctggcagagtgtgttgatgaaacataccattgcgatctcgtggcacttgtacctcaattgatccaaactgggtatcaattttacggaaatacgcaccatttctagaattaccagtattccagccatttctagcatagggatcatatcctaaaaaggcagtcagttcagattctaacatgtcattaacagcttgttggatttcatgacgaagcaaatcattaattttatcttgattgaatagagcttgagttatatttttggtaaaatcattcatgaaggagttcttctttctgtatgttttttttgttcaaaccaatcatacgagaaaggaactcctttttctaatgttttaggaaattaaattaaggaataattcatccttacacaaactattttacggtctcattatctttggtgaaacaattattggaattgcggattattttcgacctaatactttttcactttattcaattcttatctttttaacagtcgctttattatttttcacttatgctttacaattcgataagtttactgatgaagatcaagatgacgttacaggtaatgctttaatttatttacactatttaataatctttggaatcagtctaattactgttagcattaaatttattcacgaaacagacgctaattcttggtttgccgtcttatgtctatattgcggggttggtttattttatttaggattattatttgcaacacgctacaataaaccgcaattcaaattaagaagatctactattctggtctttttaattacaactataattggagcaactgcttgccttatttggtctagttttgaggtaattacaattctaacttttataatcgtagcaattaatatcagctggttagtccatcttaatcttccccacataaaaaaaggaatcctactataggattcctttttagtatctagatttttaactacgtgcccaattatcaagcacatttaagaaaaagctctctgaccaagttctaatgttttgcccttgttttttcagagcttttgccttatttaattcagtaacatctgttctgaagaaatcgtgatcaccaactagaacgtaatccgtatcttgccccacttcttcttgaataaagccgcctagattttttactgcgttagctaattcatactcatctaggtctaaatcaccagcaattaccacttttttatgaataaaaggactgcgaaaagcttgcgtttgcttaacaatatcaggccactcactagttaaatctaaagttttaactgcctcttgtgctctaagcatatgctcttgtttaaatagtttatgaaactcatcaaaaacctttttagtatctaagcaatcatctaaaccacggtgttcttggttctctgcaatattcattcgatgcatgcaatcaagcaagcgattatgtcgctcttgtggataaaagctacgcgccaaacggtaaacatctacatagtcattgtttaaaactgtcaaatgatacttttcagctaaatcataaacaaagttcaaatcaaaatttacattatagccaacaattggatcactgccgataaattcgcgatacttcttaattgcttcttgaactggtaatcctttttcttcaatagctgcttcatcaattccatttaatttagtaataaaagcaggtaccttattattatcaggaaacttcactaattctgaaaaagttgctactacttctccatgacgtactttcaagccacccatttcggtaattcgatcacgatatggactaagaccagtagtttcaacatcaattaaagtatagttttctggaaaaccaggcttttcaattcctttttgacgtattttatcttgagcagctggaattcgtagcacaccttgaataactgaaatactcattttttaaccttcatttttagaaattttttcaatcacttcaggaagcgccatccctaacccggcacttcttttttgaatgttatcaggtaattcatcctgacttaaatcggctgcaacataatgccaatctttaaattgttctactaattttaccattggatcaagcaattgtggactagttggatcaacacctaattctaaaaccacaactttcttagtttgatttctagttaaaaaccaccgaaatcttgtattagcatcttcatctgggaagaaatgtgcattaagcggcatatgaatttccattggtgaatcacaatcttcgcagcgcggaatctcgccttgtccattaatatatctctttacaacagacaaatcagagtaagtaccatggtttaatccactagaacactgcattctagtccaatcgccaaaaacatcaaaaattttctcttgctcaaatcccgctgtttcaaaaaagtgaccaaaagcactggtcgcaataaaatagttctttccatttaagagctcttttaattgcttcattgccttacttggttcatattcaactgaatattcattaattaactgactccaaaactgccatttttcatcccaggaatcaaaatttttgtctaaggcatctgcaatagttttaacatgatattttttgcttactgcttgatattcaattggaaaagccgcgtcctcaaacatatcaagcccctccatttgtgcaaagccattaccagcagtaacaattactgcatctgcttcagctagccatttttgtatttgtttaaaatctttcatgttatttcttcctttttatttttcagaatatccaaccaaacgtagttttccttcgatatattctcctaaaaagacatcatcaatactattataaccagctttagttacttcttgttcaagccaagcactagatttatgaattaaatctaaaacgtcatcattaatttgaccatcactaataattggaaagcgaatattatcttcatcgttttcaattaccgttaactgcccattttgttcaaaaatgcaatttttaactttttcaactgaataaattcctcgactcctcaatctaaacattaattcattagctgaaatacccgccttcatgcaatttccaactaagacctgaccattctttatcacttgaaccggttttccatcaattaaattacgaacccaattactacgttcacgtccaaacttcaaaataaaaactaccaaagtccaaatcactaatacgagtaaaaactgaataattgtaatgctggaattataaattaaaccaccaataattccaccaaggacataattttgtaactgatctaatgctgtagttggtgccaaattgctcttaccaaaaacgttaatctgaataatgagagttaagatccctaaagcaaacttaataaataattgtgtataatccatctttctacctacttttgtacatatacatgatgatcaattacatgagcacgagtcaaagtgtaactattattatcttcatttaaattcaattgataatcttcatttttggaatcgattcggataatcattccatcttgcaaggtcgtcgaacttaccattacatcgcttttcttaacatttgcatcgtctgcaattgacttaataaaaggaacaatttgagcagcctttgatttttgctcattattttgaatatatttttcatactgagtaccagcaaataataccaaaaataaaagtgcgatgattcctaaatcacgatacctggtattaaatcgatctcgtaaatatagcatagtaaaaataatcatcgcactagctgctacaatcattaagatatataaggccgtccgatcagtgttttggtggctttgaatataatttattgtgtaaaaattcatttaacttagtactttctttttaatggacgttcatcacgcttattatttagcaaaacatgttgttgagcaatttcaatcaaagttctagaaagtaatgccatactctcagtcgttacatattcatatggaccgtggaagttcgcaccaccattaaataagttaggtgtaggaatgcctttttctgaaataaaatctccatctgttccgccacgaaatggaataattttgggctttaatcctagagcgtcataggcatgtaaaactaaatttacaacataaggatgtttcttaattaaatcaccagggctacggtattgatcatgtagttctatagttacgcgatcttttccatattttttatttaacttatccactaggtctgtgactaactttttcttttgctcaaaaccgtcagtatcaaagtctcggatgattaacttaatttgtgcatgatcaacattaccgttattggataaaaccataaagtagccatcaaaatccttactgttttctgggacctcatcagctggtaaaccttggataaattcactagacatcaaagcagcattaatcattaagccatatgcttcaccgggatgaacaactgtaccatgaaaattaattgtagcagctgccgcattaaaagtttcaaaagcaatgtcacctggatctccattatctaaggtataggcaaactcaactggaaaacgttgaacatcaaaacgagctgctcctttgccgatttcctcatcagggccaaaagcaacccaaatatcgccatgtttgacgctagcattttcttttaaatatttgagcatccctaataaacccgcaattccagccttatcatctgctccaagcaaggttgttccatcagcagtaattaaagtttcgcctaagtgttttttcaaactaggaaattcactggtggataaaactcgcccctcttttaataaaatatcttttccatcatagtcatgatgtacttgtggctgaatattttctgcattgaagtcagcagtatctacatgagctacaaaaccaatcggagtaactttttcatctctcactgtgccaggtagttttcccacaagatatgaatcttttttagaaaaagagatattttctaagcccaaatttcctaattcttgttcaatcatttttaacaattcaatttgtccaggcgttgttggtacttctttactttggtcatctgagcgcgtatttaccttacaatattcaataaacttatcttgaatatacttattatctacattactcataaaatcaccttatctttattagttaatattttaagaaaacgaacaactgtgtcaaatctagttatattcagatgcacccgtttcagcatccaattcatcaattttacgaaaatttttacccttgttatttgcctgatcatcacctaatttttgccctgtttggtccaaataataatccacaagtggaaaaatatcttcaatttggcgcagcattccgactaagttatacttcttatccactactttttcatatctatccacatagaagcgatgcaaactattattttcagcgggaaaaatcacagtcttctcaccacgttgtatatttttccaggctttttgcgcattttcgatgtgcagttcgtcaaacgttttccctaattcttggggatggtaattcatatcgacgggttgtttataatattgaagccttttatctctatcaaagaaaaatacctcgccctttaaactagcaagtaattcattaatttgcttatcactaagcgttccagcatttagttctatctgcatgatgatcccttcctaagctatgcttatttaaattatattattatcttaatttataaaaaaagactaaacctcaaagaatctgtctttaaagtttagtccaatgaatgggaattcatttccggtttggtattttgatataatgtatctgaaactaattgagtttcaaaaaatatttttataatctggttaactttatagaggaaaattagttaaccagatttttttatttttacaacaacgagagggatattaaaatttatagctagtcgccgttcttattttcaagcatgtctctattgtataaacattgacccgcctttacttcatcccaagtaccaatcttagtatcttcaccatagtatccatcaagcataccatttatctgaaggacagtttgcttgtaagcaatccttgcattccactcaactgtatcaacatcagcaagcgatccgtgtaatgcagtcaatggatccatgtttttaccaccattggtaaacaaaactccatggctatttaatagaaaagcatttcttatttgacctctttcaaggcgtttttctacttccttcttcatatattgagccaaatcttcagtacacataggatgccactgacaagtcttaatttcttttaatttttgcgtagcctcagttacatttggcatatttagtccagtggttgcccaaaacatcgcttgatcagagtgagcatggaatacgcatttaatatctggagaagttgcataaatagcttcatgcatattaatttctctagttaagttaccagtccctgaaatgatttttctagtttcaggatcaatgactaaaatttgatctgcattcaagtgtccaagataagcttccgacatcattgttggagtcataacaagataatctttaccagtatcatcagtaactctaatggaaatatttccacctactacattagtatctcgacgttccattactaacctaacaactttagctaaatcttcacgctcaaattcaaatggaattcttccctttggaactctcataacaaccttactttctattgcgtttactacgcacataactactatttaattcttgacgcttttctaggtaagtttgtaccctttcttctctttctttacgttgttttgctctttctggaaaacagatagaatctccataatatttaaatgctaaacctaaaaccattgtaaaaatattaagccaccacatttttgtaatcaatgaagttgtaaagaaaagaaatgcaacaaaacagacaaacgtccaaaaagattttgcatttaatactttatgcataacaacttaccttccattcattatttagctgaaacttcagaatttgcacccttcttctccagtttttcatagcgcttgcccggtaatggattcttcttcatgtattggtaaagaagaacaaacaaggaaagtaaaataatcaatcctacaatagctaaccaattaaggcgacctgcttgagccattaagaatctcaaatctggagcttcaattgatgaccaagtaacttctgaaccttttggaacttttgcagcaccggttgaagtagctaatttagtaaatactccagagaaataagtagcaccgtataagaataaaggttcatagataatacctaaaacaatcattcttaataagttaccaccggtaagcaatagaccacctacaccaatacagtaattaataactccggcgattggtaacactttgttgcctggtaaaatagcggcataaataattgaaataggaatcattaataccatagtgacccaaagctcggtagattgccccaagattggccaatccaacccgattacaaattcacgccctttaacgtgtttcttcatgaagttactcattgttgtaccaaatggagttagtgcgtccataaagaacttagccattggtgggaagatagccattactgcaccaacagtaacagccaaattaagagcatctcccacactatatcgacctgctaaagcgagaatcaagccaataattgctcccataacaactggttcagacagaataccaatctttttctttaaatctctagcatcccactttttattaaatacaggaatgtaattcattacccagtttactggaaacattatagtagccgtaaaagcttcaatgtgagtagttgtaacaccaactaatccaaaatcagttttaatttcttcagcccacatatctccaagcttcaaactaataataatttgaataccagctgctacaaaagcccaaggcaatgaacctgaaatgctataaaccatgtatgccgtaagagcaattccccaaacattccacatatctgcattcaaggttttagtcaaatttgctaacaacattaccaaatttataataatttcaactgcaaaaaatacgaatgccattggccaagcccatgtaatagccgcagccccaggccaaccaaagtcaactgctggtaaattaatactagtatgagtagccagtgcttttgctgctggacttacagcagtagtaagttgattaatagccatcgacataccaatgaaaccagtcgctaagtacaagcctgaaagaatagccttagaagttttcattccaaagataagtcctaaaatgataattaaaattggaattaaaacttgagatcctacacctaaaatatcctgtacaacattattccagtccatatatttccatctccttctatatagatgaaattaactattttctaccatctctttgattttttcgttagcttcgtcttgtcccattcctgttaaccaaggtaagccagttaaatcatgatttacattgtattgatctaaggtttctcttagagcatcatctggtgcagcaatacctatataacaaataatacttgggtcattagcaaccgttgaaggagcagtttcaataggtttagggatagcctttgccttactatccaatccttgctcagctaaataatcattgattttttgtgaaacttgtggtgaagttgcaacaccagaaccacaacatactaaaattgttttcatgataaaatacctcaactaaattaatttactctgcgaactttttagaaagtaagctatacatatcttcaacattactcgtatttgaaaaagcacttacaaattcttggctttgaaaagcagccataatctctgctaataactgtggctgctttgctccatcctttaaacctaaaaataaaaagtttgaagtttgcatttttgctgaatcacccatctgctttacatcaataggtctattatttcttactacataaataaagggcttcttgatatacctaggatcaacatgcggtaaagctataggaatatcaggaaactttaatccagtaggatatgaaagctcacgtttttccaaaccagaaatatatcccaaatttgcaattcctttttcgataactctcattccaaccagatcgaataactcttgttcatcaaaaacagacgcatttaaatctatcaaattcttatcgaacatattttgcattttcatcacctctttataaattaaaatattgtttctgtttacgcttacactgtacaaaaaaaaaaaaaaaaaaaagtcaacaaaagtttcaataaaaacataaaatgttttatcttgaacatttatttttaataaactatactaaagttgctttcagcaaatatagaaatcgagatgaaatatatgtcagaaaaaaagtataaacgacagaatcaaatagtactcttactaaatagaactggctttatgacttctacttccctggccgagcaaatcggagtaactcctatgacaatcaggagggacattaatgaattagataaacaacacaaactgattaaaacatttggtggcgcaaaaccaataagcaatgtaatgacagttgaattttcaacttctcagaaattgaaaattaatgtcgatctaaaaaaacaaattggtcaaaaattagcggaaattatagatgataattcaaccatttttttaggtgctggaactacacttttatacgcagttccctacttagtgaaaaaaaacttaacctttgttacaaacagtttcatttcatttagtcgattagctaccagtgattgtcgtgttctttctacaggcggagagcttcataaaaatactggtgaatttttaggacagatcgcagaaagaacgtttgatggcttaaatctagactatgccttatgttctactaatggaattaaagataataatgtaactactagtagcgaagatgaaggtagaatacaaaatgttgcaattaatcatgcaaataaatctttaattattgctgatcacacaaagctaggaagatcggacatgattacttttagaaatttgaatgcttttgatggattagtgactgacaataacattaatcccaaaatacataaagaatattctcaatatacaaaggtttggtaaaaatgattattacagtaacaattaatccatcggtagatcgtctctatcatgtaagtaaattaattccaggtagcttaaacagagttgatctaaaaaagcgtatggttggtggtaaaggttttaatgcaggcagagtctctgcattattggatactaaaactgtcgtttttggctttattggtggtgaaaatggaaaatttataaaaaaagaagctaaaaaagatttatatgatactgttttctttgatacaaaaaaagaaacacgtaattgtctccaaattatagataataaagatgtcaaaactgaaataaatgaaaatggatcacccatcgatccgcattattatgatgcactcaaaggcaggttaaaagatttacttcttagtcaaaagattactgccatttctttaaacggctcattaccaaaaggatgcacttatcactactacattgaattaatgcaattaataagagaaattacacctcaatgtcaaatagttctggacagttctggcagtatactaaacgatattttaaaatcagatactttaccagatattattaagcctaatgaacatgaaatagcggaatatctaaatatccctgttacaacagatcctaatatattaataaaagatattcataataatccccaactcaatgcaatccccaaaatttttgtatccttgggtgccaaaggttgtttggtcaaatacgaaaatcagtacttttatgcacttcagcgacctattaccgccattaacacagaaggatccggcgattcaatggtcggtggtatactttctgctttagataaaaaagtatcaatttcacaaataattcgatatgcttgcgctgctggtacagctaatgcaatgaatattaaaacaggttttgttgacaaagaaatatttaaaaaattaatttcaaatattaaaatacataaactcaattaaggagttattaattatggcaataaaattagtggccatcgatctagatgggactttacttaatgatgagggcaaaattttgcctaattcaattaaagtattaaggcaaattagtcataaaggcgttaaagtagtcctaacaactgggcgcccattgattagtgttaagccttttttaaaagaattaaatttagatgcttcttcccatcaatatgtcatcacttttaacggcgcaatcattgaaaatacacaaggtaaaactattaaagaagccgcctttgatattcaaactttcatagattttgaattatgggctaataatatcaacctctataatcaattagaaacgcccaactttttatatacaacttatacaaatattccgatcgaggcagcacatgaatcatggaaaaataagttaccaatgaaagtgaaaaccttacatgatttaattgaaatttctaaaaaattagtcttattaaaaataatggctgtaggagataaggaagaattagatagggttcaaaataatatccctcaatctattttagaaaaactaaatcctattcgctcagaaccagaatatctagattttgctgctcctaacattgataaaggctgggcattgaaaaaattagcagaataccttgacctaattccaagcgaaataatggctattggtaatgcagacaacgatattccaatgattaaatatgctggaacaggcatcgcaatggcttcttctactcctacattattaaaaattgctgattataaaactgccagtaataatattgacggcatagagaaagcaattaagaagttcatcctataaaaacagtcatcttatttttacagcagtaaatttccagttatacataaaaatgctccagctcattttcagagttagcgcattttttaatagatagattttactttttaatagcttttaatccttcacgctttcttcccatattaaaccaaggggaaacagtaaaggccaaaacgtcattaacaacataaattaaggagttaactgccattgctaaagttgcatctccttgtgcgtaagttacaccccaaagaattaattgaaaaattccactagcagtccaccagaagtattggttgttgtagcgtaagaaacacataattccagcagttaatgaaatagcgaaactaattgcatcaatccaaggacgtggatcgttagtaaatttaccaattaagtaacctgatactgcatacacaattaaggtaccaacaattgcaataatccattctttagcaccaaatttacgtaaatggttcttagtatcatcattccaagatctaactgaaataataactggtaagtctaaagttaaaatataagcaatttgctcaaaaatcgataagtaatttttagcagctaaccctgcataaataaaacaagctgccgaaattaaaccaagccaaccattaattgccttagtagcattgattgctaacacacataatgttccaagtagagtaccaatgaaagtaattagtgttaaagtagtgattttgttttgaatcaaaatagccaattgaaacccaaaggcaaagaaccaaagcatatagttttgtactggccagccatgtaattgcttaaatagccaaacaaagtaattatcctttctttccttatgatcttcttgtaatgatgttgaattatccatccattaactcctctttctctatattaggtcacaccatatattgtgccttatccgccttttactcaaaaaggcatctgtatctagtatagtagtcaaaaaattaaaaacaagagtttacatctttaggtaaatatgcggtaggcgttccttccagttaaataaaacgctttcttttcttagtcattaggattttcgaataatttaatatttttttgacctttcagcttgcattatcagcataattttacgttccaatttatttttttgatacctcttttaataacgttttttaattaggtgcttattttattatggtataaaatttatagtctttgccttttaaagctattagtagcaactttttatcaaaaataatatgaatattcagattaatcaatcttttttgatttcattatttaaagttgagttataataacttgttggaaaacaaaattgttattttatatataaaatgattgtaatcgaggaaaaagaaatgtcacataagactgatttatcttttattgctaagcttaatgggaaagaaaagtttagccttagaaaactttcagttggattagttactgttgcattaggtacaacattctttttagaaagttctaataccgcgcatgctgctgaagtagacactacaaatcaaaatgttactagccaagaaagtacttccgattctctcaaatcgcgcactttaaatattcaaaaaactaaagctacagaagatgccacaactagcactaaaactgttcaaaataatgaacaaacttctgtaaatcaaactagtaaaaataatgaagctactgttaaacaagaaactaacttattagcaactaagtcagaaaaggcaaccactacacaagcatcagctcaagcaattaattttgaagaaaaagttcaagctaccactgatcagaatcaatctacagctgtaagtattacaggtgatgacgctaataagtcaatgatggctaatgttactcaaggaagagtttatattaagcaaaataaagagaaccccattactattaataatggacaaaaaatcacagtttcaatcgctgccactaataacttgttacgctttagtactcctccttctaagattaacgactttgagataagcacatcacaaacaaataccaataaaatctttacttttacttatactggtagtgatgatgggattctatcaaattttaatccaaccttttattttacagctgataatgacgcaactaagcaatataaggacattcacggtacttacccagacttcaatttacctgttaccgtaactttatttaataaccaaaaatttactcaaaacttaccaatcaagattactccatataaagatctagttgtaaccaaagaaattcttcacggttttgttatgggaccaaaattaattggaacccctgggcaagacggttatcctggtaataatggttcttataccgaaaatggtgcaacttattatggaccagaaccaagtgctgcggcagatgttcctgctgataaacagaaatctgctcggctaatgcaatacgcacttgagtggaattatggttctgctaaagatccaagtttaaatccattgatggatgttttagttaacatcaaatttaataagggacaacaaattcttccatctactattaaagttttcaagattccagcaaatatggaagttgttgattctgatggtcaaagagttccgatcaataattactacaataagcttgcaactcttcctgaagacaccaactttgaaaaactattaagagactcaatttctgaggataaaaaacaaattaagatcgatcaaaaaggtaattttacagcaaatggtgtggattattccaaaatgggtccttactttattcagttagataccctattaaaccctaacgctattgacaattgggcaagtaatccagattccggtgtggggccttcaattactactccaattgttaatgaaaatgattggaaacactccggttcaggaagtacaactaatacctctactcaaacttataccgacttcaaatttgatcctgcagttgatcgtgttgttagaatctacttcattgacgaaaacaccgataaagaaattccagatactgtaagatcaattattgctaaaactaattctactgttgataacccaactagcagtattatcaatgatcttaagaaacaaggctacgtgttagataaacaagcaactaacggtgaatcaagtgatttcagcaagaatctgaaaaattacaatataagtaatcaaaactttaagacagattctttagaaaataactacaacagtcaaaagattaatatcaaagataaatcacttaagtattacgtttacctttaccatggtactacaccagttagcgacaaaaagacaataaaagaaacaattaattacgtttatgctaacggtactcaagaaggaaaaacggccgcaaatccttatgataagactgtaagttatactcgcactggaactaacgatttagttaccgaccacattacgtgggaaaaatggcaacctgattccagtttcaatgctgtagaatcacctaatgcaaatgataagaattataccttagttgataaagatgaaatcccagtcattaagttaaatatcgacaatgacggtaagattactattgaaaataatgttccattaatttacacagttcattactatgccccagaacatgcacgccttactttctacgatgatactgaaaatcaaaacttatctgattatttaaccaaaaatggacagaaggcctcattaactgatacttattctgaattagacaataattcaagcaagcagcctatctcatttactgatgcagataatatcgttaactttttaaagaacaatcactacatctttaccggtgtttctggtaatggttctatcacaaattctgattattcaaagatcgcttatggaaacttcgataatgatgaaactaaggatcaagagtttattcttcattttaagcatgcattagataatcagaatgaaactgctgtagttgcagaaaaagttaactatgtctatgaaagtggtccccacgcaggtaagacagtggttgatgctgcaacttctccaattgaccaaaaaattacttacacaagaactagaactgtagaccttgtcaatgatcctaaaggtgaaaatactaaatggtctaactggacacctgataaagcattcattgaaaactttaatttaccagaaaaagttagtggtcttgataaccaagaaaaaatttattcattagatttagctcaagttaaagctacaaaagatggtaaagtgttcgactactcttcacttaaactgccatttgaaacatcagaattgagtaatgataagactattaatctaaaagtcactattccatatactttagctgaaaatattacagttaactatattgatgacacgactggaaaaactttagagagtaagtaattatcaggtaagcctaatacagaagccaattattcaactaaggatactattgataaatatgtcgctcaaaactatgttctagttaacgacccaaccaatcaagcccctctttcatttgacaacgacgaacttcctaataatcaaaattatgaagttcatttcaaacatggaatcggtcctgtttctaacaagaagacagttaccgaaactattcactatatttataaagatggttccccagctgctaaagatgctactaaccaactcactttcactgaaactggtacaaaagatttagttactggcacaactgatacaaaatggactgctccacaaactttcgcttcagtcacttctccaacaatttctggctatactccagatcaacttaaaattgatgctattaaagttgaccataactctcaaaatattgagaagacagtcatctacaatgctgataagcaaggtgctgttcttcgcttctatgatgatactgaaggaaaattcattgactttgctaaagaccttaagacagatggaacaagcaaatctactatttcatttactattccatccaattacgatttttcaaactataactttgttgcagtaaacgtaggtaatgatcctaaaaatataactactaagttgtcaggcgatacgttgtctgatgtaacttacggcaagtttgatactaatgatcaagtcgaccagtacttcatcgctcactttactcataagacaaatgacgttaaagaaaataagtctatttctgaaaaagttgtcctttatgccgaaaatggtcctaagaaaggtcaagctctccaaactattgaattaggtaataccggtttcactagaaatggacaaaaagacttggttacaaatcaagtttcttgggaaacatggacaatagaaaataatagtcacgctgtttctctaccagtgacattttcaactgtttataagattgatcctactaatattactcaaactacacctgtttccaagaagtttgaaattaataatcaaatagtatctccactaaccttcaatgctacgacggatcaagatttgattaaatctttagcaaacagtacagaatttatggttaaagttccgtatgaattaactgaaaatgttaatgtaacttatattgatgatactactggtaaaacattagaaactaagagcttatctggtgctcctaatacaaattcacaatattctactaaagatacaattgataaatacgtagctaataattacgttttaatcagtgatccaactgatcaaaaaaacattttctatgataatgatgaaaagcctaacaatcaaaattatgatgttcactttaaacacgcctttaaagagatcaataattctaaaactgttaacgaaactatcacctatatttatgataacggcaaagaagctgcaccaacttataatacttctgtagaatttactcaaactggaaagctcgatttggtaaccaacaaggaagaattgaatgattggtctccagtttctaatacctttatcgcagttacctcaccagtcattaagaactatactgccgatcaaaaacaaattgctgcacaagcagttcaaccaaatagtagtgacctttcattccaagttgtttacactgctgttccagttcaacctaccaaaccaaccgagcctactaagccggttcaacctacaaagccaactgtacctactaagccggttcaacctgctaaaccagctaaatcaacacaaacccaattagtaaaaaagaacaacgaaacaaaatcacctatttcttctcatttagctttaccaacaaacgctgctagtcacgaaactaagaagactgaagaaaacaaattacctcaaactggcgctaagccaaatgatgctagcctaatcggtttagcctttggtgctacttcattcttacttggtctagttggcagcgaacttaaacgaaagaaaaagaattagtttttttgtgttctaaaagcatttttctagtgagaagttaattactttcggtataatttttaattaatagctacttttttagaaaggaaaagcaaatgattaaagaattcaaagaatttatttctcgtggtaacatgatggacttagctgtcggagttattatcggtgcagcatttaccgcaattgtaaattcattagttaaagacttaattaatcctctcattggattatttattggtaagattgatttatcaaacttaaaattcactgtcggtgaagctacgttcaaatatggcagtttcttaaatgcagttattaactttttaatcatcgcattggttgtcttcttcttaattaagctagtcaacaaaatgatgcctaaaaaagaagtcgaagaagatgatcctacaccaaccaatgaagaattatatcttcgtcaaattcgtgatctattacaagaaaaaaataaatagactactgcatcccttaaatgtttgagggatgctttttttctaaaaaataaaacttcctttagctgggttatgaaacaaggaactaactgcccgtttgcaaggattttttgatttaatgcgtggtaaaattaatacaaatgatagctttattcaaaagttacaaagcgatgtagaaaaatacaaaactaatccagaaagaaggaaagaactcatgaattaccaaatgaaacttgatgatatgcgatatgttggagaaaagacaggaaaagaagaagaacgaattgacgctattaaaaagatgatccgacgctatcgtcaattcaacgctgatgatgaaaaaattttaaatctcttaactcaggattatggaaatgatttttctcaagaagaattaaagcagtttattaaagagaattagataatataaaaagcatcaatgacttcgtatcattaaagtcattgatgcttttgtttataaattaaaaagtagctgtctaacatcaattaatattccgaagcaccagagttagtatcaggttttgcttctttcttttcttctacgtgttcttcgtgcttagacgcactagttgcagtatcaacttcatctttcttataagttgcgccagtggttgcgtcaggatcatctaccagcttttgaccagtagtttcacagaaatattttacaaatggataaatatcttgtacccattcataagttcccatatagttaccatcttcgtcttcaattcgcttataatcatgcaaaatcaacttatgacgattaccatttggcactggcatcttaacttcatcgtgtccatctaccttatttcttaaagcatagataactttcttagcttcaggaataacattacgaatatgagggtgaactgctcccatagtatcaccaacttggtctggagtacgaccagcaagcatctttttatttggatcagttggcttgttataccataaaaattggttattatcatcaacataagtcaattctccaaacgtacgacggagcatccaattaatttgattaaccgtaagaagaccagcatccagctttacatagtcgtcaccttcagctgcattaactttcttagctgccttatctaaccactctggatcatttttatctataccttcaacagtgtagcgtgatttaccagtcgcatcaaaatcttctttaagataatcttcttcttttaaatcttttaaccatttaggttctgccattttacttcacctcataaaacttatttactctcaagttgattatacctactaaagaaagagctttcaatgtctatatacaatattttatatactgttttagcataatatatatttatggaatattatttttttaagattaattgttgactaaaagtaagttataggatattataacttgtgaaaagtaagaaaggagctaatgattatgtttaatgtacgtcaagcaaattcttgttgttgtaattgtcaaaaaatttggcaattatttggcgtacagtcattagttcacttcaggaatttctctagttagaaactagcttttcaaagttataactatgatttttctcaagagctgttggcactaggccaatggctcttttttgtttgcttagaatcggggttgaataaattgcaaactactctcattgttttagtagccgtcgctattctagctggcatggcttacttacataaaaagaattggggatttaccaagctagtatttctctcattagtcgttggaatcgtctttggagtttctattcaattaatgtttggtgccaaaaacgagattgtaaaaaatagtattgattggatttccattgttggagatgggtatgtctccttattacaaatgttggttatcccacttcattagttggtgcctttacgcaattaaaaatgactactaaaatccgaaaaattgctacaagtgtcttagctatcttgctaggaactactgcagttgcttcattcctgggctttagcagtgttgcaatttttaatttaggcggagctggctttgctaagggaatgactgcttcttcaactgctcttagtgcaattaaggaccatcaagaacaattgaaaggcctaactttaccgcaacaaattacttcgtttttcccgcaaaatatttttgccgactttgcaggaatgcgttcaactagtacaattgcagttgtagttttctctatctttgtcggaattgcattcttacaaattaagaaagaaaaagctgaagtcgctgctaccttcgcacgtggtattcaagcattacgtgcaattatcatgcggatagttaaaattgtactcgaactcactccatacggaatctttgctctaattgctagaactactgcaactaacagtttcgcaacaatgagcaaattattggtcttcatcgttgccgcttatgttgcaataatagttatgtttattgttcacgctgttttacttttaattaatggaattaatcctattacttactttaagaaggcgtggccagttttagtttttgacttcacttccagaactagtggtggtagtttgccacttaatgttcgtactcaacgtgaatcaatgggcgttagcgacacaattgccgatttcgccgctagctttggtttaactattggtcaaaatggatgtgcaggtatttacccatcgatggttgcagcaattactgctccccttgttggagttaatattttctcatggcaatttgtcttaaccttagttgtaattgatgttatttcaagtttcggcgttgccggtgttggtggcggtgcaacatttactactttaatggtacttggagcacttaacctgccagttacagtacttggagttttaattgctattgacccaatcgttgacatggcaagaactgctcttaatgttaatgattcgatggtcgctggtgtaattactgctaagcgtactggtgaattagattggaatatctttaataatcaaaaagatgatgtagatactgaaattgaataatttttataaatattcttgacattattatttagtcattgtagtattatgacaacaaaattaattaaagcttagaaaagatgagtaagcacttaatgcatctcacagagagtcggaacaggtgtaagccgatgttgctagagtgaagaagatggtcttggagctaaattaaaatgcgagctatttaaagtaagcaatttacgattgacgtacgttatcacgtctgagtcttccatattttggagtacttattaaggaactgattgtgaaatcggtttgaatatagggtggtaacacggtattaagcgtccctagtgtagtgtaatagctatactaaggacgctttttcttttgccgatttttttttgtcaaaggagggatcattatgaaaaataagaatattatttttaacgaacgggtatttaatcgaatgtgctacttaaatatgatccttcttgttagtggatcctcaaaaaacatttaagtgaaaaatttagttaaaattaagaggtagattactatgacagaattagcacatttcgacattgttggtagttttttaagaccggaagaattaaaacaggctagagataaatttaatcacggagatatttcgcaagctgaactaattcaagtagaaaaccaagatattgaaaagttaattcatacagaagaaaacttaggcttaaaagctgtaactgatggcgaatttcgtcgcagttggtggcatcttgaatttttatggggtttaactggcgttaaaaaatatgattatcacgaaagctacaagttccatggcgctaaaactagaacagataatgcagaattagctggcaaagtagcttataatcccgagcatccattctttaaagcgtttgagtttgttaaagagcatactaatgtgactcctaaacaaactatcccatcccctacactgctttttagagataaccgatcagataattggcctaatttttataataataaacgagcttatcttgatgatctggctaaagcgtaccatgaaacaatcaagcatttttacgacttaggttgttgctatcttcaaattgatgacacaacttgggcttttttaatcagtaaattgaacgaatccaaaaatgatcccaaggaacatgaaaaatatattcaattagcggaagattcagtgtatgtaattaataagtcactagaaaatctaccagatgatctgactgttgctacacatatttgtcgtggtaattttaaatctacatttcttttttcaggcggatatgaaccaattgctaagtatttggcgcaattaaattataatcgctttttcttagaatacgacaatgaccgtgctggagattttgctccaattaaaacaatctggaacaaccgggatgacgtcacaattgttttaggattaattacatcaaaagatggacagttagaaaatcctgctgcaattattcaaagagttaatgaagcagctaaattagttccattgtctaacctcgcgcttagtacgcaatgcggctttgcctcaacagaagaaggtaatattctcagcgaagctgatcaatggaaaaagataaaattagtcgttgatactgctaacaaaatttggaaataaaagatatttttataaggaggaaatttattatgggtaaagttgaaagttttgaattagatcacactaaagttaaggcaccttatgttcgcctaattactgttgaagaaggtaaaaaaggtgacaagattagtaattttgatcttcgcttagttcagccaaatgaaaatgccatccctactggaggcttacatactatcgagcacttgttagctggattattgcgtgaccgtattgacggctacattgattgttcaccatttggttgccgaacgggctttcatcttttggtttggggtaccccatcaactacagatgttgctaaggctcttaaggaagcacttgaagaaattcgcgataatattcaatgggaggatgttcctggcactactattgaatcttgtgggaattatcgcgaccattctctattttctgctaaacaatggtcaagagatattttagaaaagggtatttctgatgatccatttgaaagaaacgttgtagaataattatttttgaaaaataggacaaaaaagatgcatattactgcttcaaacagtaaaaatgcatcttttttcgtatttatttaatttttatctttttcttctcttcctttctttaccaccaattagtccaattattgctccgacagaagctaatgctaatcctgctaatgataaatctgtcttttgactaccagtttgcggtagtgttgttctagcacgattaatttgcttagctgatgtgacatttcttgaagttccaactgcataagttgtatgagttaagcttgtagaagtgtttgaagcttcaacattcttggacttgtttaacttattaatttgcgtaacaatcttagatgattctgtttcattcgattgatttggcttgttaggtattgtttgttcttccggctttgttggttcactcggttgtgctggcttacctggtgttgtcggttcttccggcttcgttaattattctttttatatctcttccacaagactatattccaaattatcaacaagcacacccaaaagatggctaaaatcatcgtattccgataaccactgcctttttgaatcttattccaaatttcgctaaagtatgttccacttaaaaatgcacttaaagttattatcgataaagtcaaagacatctttttaattttatccttaaccttcatcaactgaatccagttatagacaacttcacaaattacgattagtaaaactagtaagtcataccaccattcacgttgtttaacaaattcatcaatggtagtaataaaatagtaacctgcaaggattgcaaatatgtttaagatcaacagctgtcccacaactgtactttgttctttttctttcatgatcttccgcactttctactttttctcttcatataaattataaaacattcgctttttttcttgcttaacctaaggctctattttttaaactgccgccaataattagcaaggtattctgttgttaaactcacgggatggttaatcaaatcttgtgtttgtcctgcagcaacgacttttccaccattttttccgccacgtggccctaaatcaagaatattatctgcattaactatcatatttagatcgtgcgtaatcgtaataatagttgccccttgatctagcaatttctgcattacttgaactaaaactttcacatcaagcggatgtaatccaattgtaggctcatcaaatacaaataaagtatcgtcctgtttatgacttaaatgtgtcactaacttcaaacgctgtgcctctccaccagataaagttggtgtactttcacctaaatgaagataatctagtccaacttcttttagtaaaagtaagtcacgctcaattttaggttctttcttaaaaacaggaattgcttcattaatatctaaatttaaaatatcaacaattgagtagccgttccactttactttttgaacttctggattatagcgattaccctcacaggtcggacaaatctgctgcatatcaggtaaaaattgaatatctaaagttacaattccagttccaccacaagttggacaagctccctgtttattattataagaaaagtaagttggcgtataatgcttgttttttgcaagaggctgccgagcaaataatttacgtaaattatccataattgaagtatatgtagcaacagttgcgttgtgctttaccaattggtgaagcatcaacgctaactacttgattaattggcgattcaaagttcttaacttgtttaggtaaattttcaccttttgcttgtgcttgaattgctggaactaaactatctagaattaaacttgtcttacctgctccagaaaatccagtcacagcagttaattgattaacaggaatattcgcatgaacatcttgcagattaaaataatgatccacattaaatgaaatttttacagagttaactttttctgctcgctttctcgccattaattcagcagttccatcaagataaggtctaattaaagattgcttgtctttttttatttgatcaacgctaccttgatccagaatttcaccgccttgttcacctgatcctggtccaatctcaattatttcatcagctgctttaataatatccacattgtgatccacaactactagtgaatttccttgtgctactaatttatgcaagaccttaattaagccgtcaacattagcaggatgtagcccaattgaaggttcatctaagacatataagacgccagttgtttctgttctcaacgtgcgtgctaactgaattcgctgtaattcacctgtggataaggtgttaccatttcgagccattgttaaataatctaagcctaaatcaagtagtggttgcaagttctccacaaactctgtgaataaggcgctggccattttatgcatctcagctggtaaactcttaagcacttgacctttccaagcaatcaaatcatctaacggcatttcagctacttcgttaatatttaaactacctactaattgcttcaataatcctggctttaatcttgaaccatgacacacaggacaagtctgatatgagaaaaattctgaaatccgcttttgcgcacgttcgctcttactagttttggcagaacgtaaaacagcttggtgagcattttcataaagggcattaaaatcatgaaaaactctccccgttcctgataaaaagtccattttatacttcttttcaggaccattaagaacaaaatctttttctttatcagttaaatccttatagggaatgtcaatcctaacccccgcatgttctgctacattgggcataaagtttctaccaggtagcgaccacgaagcaactgctccctctttaatagaaagactaggatcagcaataaacttactatcatccaattgacgtacttttcctgtcccgccacattcttcacaagctccatcagaattaaaggcaaattgctcagcacttggcacataaaacttaacaccgcaaactggacaagtaagttgacccatttcttcacctgactttgccattgcttctgcaatttctagacttggctttaaacggtgaccattaggacaaacaggcgagcctaatctagaaaagatcaaccgcaaaatattaaaagtttcgctcattgttccaaccgttgctcgttcagatggaatagttggacgctgtcttaaggctaaagctgaaggaatatgcttgacgctagtaacatttgcctgatttccctgtttgattcgtctacgcatataagtagacaaggcatctaaatatcttctggagccttcttcatataagatacccatggctaaagaagattttcctgagcctgacaaaccagagattgcaacaaatttatgaagtgggatattaacatcaatatttttcagattatgaacacgtcccccacgcacttcaatctgagttggtaactttgcagtcaaagtcagttcctccttactttttatcaactactatcttacaacaattattataaaaaatagccattctatcgttgcctatacaaaaagaagactctgctttataaaagtagagtcttctgaaggaatataactatgaaaatttaatttaaggaaatattatttaagaattgtgtaatttgtgttgatatatgaggattatggaaaattaaaattttaagttattttgtaaagccaacatcgtaccatgagtttgctgatggcttaagtgaccagccagttaccttgtcgttaactgcagttactgaccagctgtttgtagtaagtacaacgtaggcattgtcatacatccattgttgccacttatcaaatgcttgtacacggtacttgtggttgaaggccttagttgaatcaatgttagtaagaagcttagattgagttggagaaacaaaacgagccatgttgtatggagcaccttcactgtaaaggtccattggtgatggttcagatgataggctccaaccaccttcaaagacatcaatcttaggactatctgcttgaacatcttgtacccaagagttgaattccattggacggccaccaacaaatttagcatctaagccaatcttttgccattgttggatgtagttagtccagatcttttcagcgtttggttgtgtattacgaacagcaacgttaatagttaacttcttaccatttggttgacgacggtatttttcacccttacgcttcttgtatccagccttgtctaacaattcattggctttcttcaagttgtatgggtagcccttgatactcttgtcggagaagtctccaaattgtgctggaattaaagtattaatacggaaagtcaagccattgctgtagcgcttgttaacagcatcaatgttcattgcataagccatcgctttacgtaatgaaacattgttcatcttagcgttcttatcttcaacgttcttaccagtcttcttgtcaaacttacctaccttaaagcctaagtagttgtaagatagaggaatcttaccaatgaagttaacgcccttagtatccttaacattgttccattgagagttgagcacaccagtaatatcaaacttgtgactcttaatagcttgagaaacagagttagttccaattacttccatagtaatcttgtctaagtttggcttaccacgccagtaatgttcgtttggtacgtaagtaactgattggccacgaacaaccttttgaaccttgtaagggccaaagaatagtggttgcttacgaactttatcatcagataaaagtttctcaaatggaacatctttcaagtagtggtatggttctgcactttcaaggaagtaaccgttacctgattgaagcatacctggcttcatttctttgaagtgaagtacaacttttcgaccattttcgccatttggcatttcaataccagaaatcttgtcggtcttacccttatgatattcttctaaaccaacaaggttagctaaagaatctgtatatcttgaagtcttggtcttagggctaccaacaatttcgtaggcgtattcaaggtccttagcagttacttgcttaccatcagaccacttaacaccctttttaacttccatggtaattgtctttgcattcttatctaacttaaaggtagctgcacccttattgttaatcttatagctatcgtcaacactaaagagtgattctaaacctggactttgaatttctgtgtcagtagacgtatcagataattctggtaagaaaatacctgtgaaaggtgagtcactttcaattgcatactttaatgttccaccctttttaacttgtttcttaggaacagcttctttaaaactaactttcttatcgctagcgttattattgttgttattcccacaagcagttaaagtcaatgccgcaccggacaatactgtaattgctcctaaccacttaacttttttcattttttctccccctttgtgagatgacttaaatttcttgatttttattatatgatattaaaatgaaaaaaacaatacaaaattaaaatattttttggctaaatttgtgttttattaaaaatctagtattaatacacttgttttctttaaggtgtaatctgatagttataaaaatcgccaaaagttataaagagttataaaaaaagaaagatgatacacatgaataataatcctttcaatcctagttttggcaaaataccaagtatctttctaaaacgcgataatttatctcaaagaataatcgacgaattaaatagagaaaattctccatttcaaacttcactcatttatggtcaaagaaggtctggaaaaaccacccttatgtctgaaatttcttctaaacttaaagaaaataaagactggatcattattgacttagtctttgataatgatttactcatttctctaactaatcaacttcaagagcatttattaaaattaaaactaattaaaaatttagatataaaaatgaactttctcggcattgatattaatgcttccttagctcaaaacatcgatgccaattttcaacaaattttgcaaactagtcttgagaaattaacaagaaaaggcaaaaatgtgctaattaatattgatgaggttcatttaactcctttactaaagaaatttgccaattgttatcagatcatgattagaaaaaatcttaaggtttctttattaatggctggtcttccagaaaatgtttctgaaattcaaaatgacgatgtcttaacttttcttctgcgatctaatcggattgtcctcaatccattgaacttagaaactattaaacttagctacaagcatatttttcaaaatgctaacttcaatattgatgatagaactattttatatatgaccaagcaaacacaaggatttgcatatgcctttcaacttttgggttatcatatctggagatatgctacagaacagaataaaaaaactatttctctttctttagtagacgaaatcttagacatttatttgagtgatttaaatcgcaatgtttactttaaggtttacaatgatctttcttctaaagaaaaagagttcgtgcaagcaatggtaaaagttggaaaacaaaaagtcaaaagccaagaaatcgggaaaataatgaataaaggtgctaattatttagctgtttatcggagaaaattaatagatgatcaagtaatcaaacctgatggttatggctatgtcagtttcttactcccgcattttgacaagttcattgaacaagaaatgatcttaaatgaattctaaaatttcaagcaaaaaaagctggtaataccaacgccatttcaagcgaagatattgccagcttttctttatattctcttttcagaagtttttttaatttttctcttaggtgtgaaattcaaagctaaaactgccccaattactaaaaatgttcctagccaatccatccctgacatcaccaaaccaaagattaaaactgaaccaactgtagctgataagggctcaaaagcatcaagcaaactaaccgttgacggcttaacataacgtaatgcattcgccataatctgaaaaggcactattgttcccagaataataattgctcctacccagagccaaacttttggtgtgtttggaacagcgggaaagctaggatgaaaaatcaccaaaccaagtccagcaaaaatcatcccccaaccagtcaaaactaaactcgatattcttttaacaattttaactggaatcaacgtatagcttgcttcacctagagcagataataagccgaaaaataatgccactggagtaattgttaaatgatttaaatttccatgagttgacagcaaaaatacaccaataaaagccatcagtgctgctaaaatatctaaccttcttaaaacttgctgatgagttaaagcaagataagcaagaacaaaaaacggtccaataaattgtaagatagtcgcaatcgaagcattcgccatttcaatgacaataaagtaaaaaatctgtactggtaataagccaaataccccataagcaataatgtgcaacgtatttttcttgtcttttaaaactgaaattggcttttgatgtaaaattgtcgcaatgattaataagacaatcccagaaataattagtcttacttgtgtcagccaaataggtgtaattttagaactgatcttaaataaagactccgcaaataaacctgatattccccacatcacagctgctaaagctgccaaaactgtccacagtctgcttctagtaacttgcttatccatccagcttcttcctcacaaataaaaatcaatctaaatcatcatagcatagttactctaagcaatcattgtaatttcgacaaaaaaatactgttcaattaggtaagcaacctgaacagtattttttaattcaaattaatctaaatcttttccatcagattcaataactttcttgtaccaatagaatgaatccttgggcattctctttaaagtaccgttgccttcatcatctctatccacatagataaagccataacgcttactcatttgaccggtacctgcagaaactaagtcaatacagccccaagtagtgtaaccaattaaatctacaccatcatcaattgcacgctccattgccttaatatgcattctcaagtaatcaatccggtaatcatcatgaatcttgccatcatcgctgatcttatcaactgcgccaagaccattttcaacaaccatcattggaatgtcgtagcgatcatacattacttcaagataatattgaagtccatctggatcagttgcccagccccattcggaatacttcaagtatgggttcttaacaccagcagcaaaattaccaccaactttatcttttacttcatgggtagtaataatgttagacatgtagtaagagaaggtataaatgtcaacttttccttcaagcaagtcttttcgatcttgctcggtaatatttaaatgaacattatgctcattccataaacgcttagcataagttgggtatttaccttttgcttgcacatcaccgcaggttcccacatatgacggttagccaaaatatccttaggatctggtgttaatggatagtctacaataccacaaatcatattaccaactacatagttaggatctaatgcatgagcaatcttaactgcgcgagcactagcaacaaattgataatgcaacttttggtaggcatgttgatataccttatcatcagttacattattgccaaatgcactcagcattaaaagcgttgagttaatttcattaaatgtaagccagtacttaaccagtcctctgtattcttcaaacaaagtagttgcatacttaacatacatatcgatcattttgcgatctccccagtcatggtatttttcgctgaggtataggggatcttcatagtgagaaatagtaactaaaggttcaatcccgtactttttacattcttcaaatacacggtgataaaaatctaacccagcttgatttggcttttcttcatcgcctttagggaaaattctagtccaggcaattgaaaggcggaagatcttaaagcccatttcagcaaacatcttaatgtcttctttatagtggtgataaaaatcaattgccacgtggtttgggtaatattcatttggatcaattgcaccaactgcgccttctggcaagcccgccccaggaatacctggagttttttctaacttaccattcaacttataagtcaacattcttggtgcatctaaactaccagcagttgtaatatcagtgactgataatccttttccatcttcatcatacgcaccttcaatttgatttgcggcagtagctccgccccataaaaagttttttggaaatgacatttatatttctcctctttttcaatactagtcatttttattatatatgaaatcgattacattatctaagccatttgaggatttgaactagctgcttctgtttcactagctccttctaagtctaaaatctcttgtcctacttttaccttgccttgacttacaacagtgatcttttcataatcttttgagttagtaactacgattggtgtcgttacaacatagcccttagcatgaattgcatcgatatcaaacttaactaattcatcacctgctttaacttcgtcgccttttgcaactaaggtttcaaaaccatgtccttgtaaattaacagtatccattccgatgtgcatcaagatttctgcaccatcgcttgtcttcattccgatagcatgtcctgttgggaaggtcattacaactttaccatctgctggtgcatgtagaactcattcgctaggctcaacagcaacgccttcacccatagcaccgcttgagaagacttcatcttttacttctgatagtggcaataattcaccagcaagtggactaactagttcagttgaaacatttaagtcgctagtacttgctaagctgggggcagctttcgcaatagtatctgcttggtttgcaacttcttgaacagtctttgcttgtttttcatcgtaagcttgatcaacactcttcttgccaagaaccatttgtaaaataaatccaagaacgaatgagacagccattgcaatcattaaaccgtaaacactcatgtcaacaccagtctttggaccaatagcagcagggattacgaagactcccataccacccatcatgtacatcttagtaccgaagaatccaatcaaaccgccaccaataccagctgcaatacaacttaagacaaatggctttttacgtggaagagttacaccataaatagctggttcagtaacaccgaaaattcctgataagaatgctggaagagcaataccttttaatttttgatctttagtttgtaataagattgctaaaacaacaccaatttgtgcaaatgaagcacctaatgataaccctaagattgggtcataacctaatgcagcaatatttgacatcatcactgcaacaaatccccagtgaacgccgaagataacgaatacttgccagaagccaccaagtaaaatgccagctaatactggactaaagttgtaaacagctgaagtaatggcagcaagtgcattaccaatccaagtagcaagtggcccgataattaagaaagttaaaggaactacaatcagtaaagtaacaaatggaactaagaaagtttttaccacagttggaatccatttcttgcaccatttttcaacaacagaagcaaaccaaaccgctaaaataattggaataactgttgaagtatagttcattgaaataattggaatacctaagaatgtagcatgaacttgtgaatgtaagaacgttccgttaaataaatcaaacaaaacttttttgctgctattcattgctaccattgctggataacacattgcagcaccaattgtaatggctgtaaagcggtctaccttaaacttcttagcactagtaattgctagaataagtggcaagaagtaaaagaaaccatccccaatcgcatataaaacttcataagtaccagaggttttagcaagccagccaaatgaagcacacattgcagttaagcctttaatcatacctgctgcagccattggccccaagatcggagtaaagatacctgaaataagatcgatagctttatccattaaactcatattgctgtcatctaaatcatcatcagcaacttggccaccaccagaaaagccaccttcttttaagactgcctcgtatacgtcagcaacttcattaccaataactacctgatattgtccaccagctttaacaactgtaacaacaccatcagtatcttttaaggcatcatcattagcctttttttcatcttttaatttaaaacgcaagcgtgttgtacagtgaacaacgctgattacgttgtcttttccgccaacgtccttaataatcgtttttgctagagcatcatagttcttagccatagcttttttcctcccaataataaaacccaagctactcaaaaactagagaacgtaaatgttcaatgtctttcagtaacttgggttcttgcctaatcgaattagtaacatacctaaatatgaaaatatttaattttcttggcggtttgtcacgcgccaaatatgtaaataagttgcgattctctctgccgtatcataggcatgattgtacttaatcttcataaaagctaatagcgaatcatcaagttcgccacttttttgatgcttatttcttaaaagtcttaccaataatactcttaagtgagtaatgaagcgactataattaaacgactctgtatctaaagtcatttggtattgatactgaataatatcaataatcccgctaatcaactcagtgatctcaactgtttcttgaacctgatcattatcagaagctgcattaacgaagtgataagtcataaaaatactttcactcggtggtaagttgactttcatttctttattaattaaagcaatgactttttcgctaatcttatactccttaggaaaaagattcttaacttcccagcgtgtattagcagcactcatatcaatatgatcttcaattcttgaaagagcaaaatcaatatggtcagctaaagctaagtattgaaaatcattgaacttcacttttagaagtggctccaccatctggatcaccttattggttaaatcgatggttgaagcattgatttctttaacttgattgacttcatcttgatgagaagtagcggtaaaccgcctttcaattttattctcatcaatcttatcgcctttctttaagccaaagcccacgcctttgcccaggactacttgttcttggccttgatcgtcctgaaccaaggctgcactattgttaaatgttttaagaaatatcatccgacgaatcacctttatatagaaaaaagctaccacaaactacaatatacactttaagtatatcatcattatttgtagtagctcagacctgatcgcatcagtaatccgcttatttacagtaattataatagcgctttcacatatttgtgtcaacaagcatttgcagaaaaatgcttattttcatgtcagaaaaaaaggctagaccttaatgtctagcctcttttagggatttcaaactaacttttattatttttgacgcttttttctatctacgcctaatccgaataaactacctactgcggcaattgctaagcctaagataccagctgtattttctgacttagcaccagtttgtggcaatgtattcttttcagcatggtgattttcatttacagtagctgcttttgcagtattggtttcagaattagtttctgtagtcttaccaccattgttgtcacttgttccagtagcgtctacatagaccttaactgttacatctacgctagagccatctggataagttaccgtaacaacgcctgtatgttcaccaattgtagaaacatttggcacttctttccaagtgtacttagtaccttctggcatatcgttcctgttcttaataccttctgatgggtttggaacaacacctggagtagtgtgaattggttgtggctctggagttacatggttcgtaccgataattactgttacgttaaccttatcttttgaaccatctgggtaagtcacaatcacagtgcctgtagtcttgcctggcttagttacatctggagtcttctcccatgtgtacttagtgccgcttggcatatcgtccttgttcttaatacccttttctgctggtggtactacacctggggtagtgtgaacatcttgaccttctggggtgtacttatctgcatcacttggagtagttggattgtcaataattactggaacatcaactttatcctttgaaccatctgggtaagttacaatcacagtgcctgtagtcttgcctggcttagttacatctggagtcttctcccaagtgtacttagtgccgcttggcatatcatccttgttcttaatgcccttttctgctggtggtactacacctggggtagtgtgaacatcttgaccttctggggtgtacttgtcagcatcagttggagttgtagtcttagtgtaagcaactaccacattggtatttggtgtgttagcatttacattcttatcagctaaaacaacttttgcatctttgccatcaacggttgaagtatagtcagttacttgtggcacattgtattctggccaagtgccttcagttgctccagttgacttccaagtattgccatcttttacgccaacagtccatggagtatcagcttctacattttcaccttcaccgccacgaacaaagtgaacagtttgaacaatcgtttcagttgttccatcaaccttattaacagtaatcgtacgaacaacgtctttgttcatgtccttattatttggatcatatggtgttggagttactgtattactcttttggtaagtaatatgaactgcttcaccatctactggcttgccgttttcaattgcggaagctgattgaatttcagttgctttagtgccatttacgtatgaatcgtaactagaaatttgttctactgctgcagttggatattctgcttcgccgcctaaaacaaacttgttgttttcgatcttaccaacttcccaagcaccagttccagtaacttttccagttactaagtcttcaacaccgtttctaccaaagttaacagtttgagttgcaattaattgctctgctttgcctggcttagtttggtaaatcttacggctaacgctagtaaacatgtccttgtacttgtacttaggatcagttggatttacacctggagttgttggagtaatgtcctttgtttcgtgaactaagttaataacaactgcttcattcttagcaggaataactacattttctggtaatgtttgacctgcagctagcttgtaacctgctggaatggttaagttagtctttacattaacgcctggcttaccacttacaacaattgggttaccaacattcttcttgtcaacagtgtcatagaattgataacttacagttacatctgcaactggagtttcactttgttggtaagtaatgtgaactgcttcaccatctactggcttgccgttttcaactgcggaagctgactgaatttcagttgctttagttccatttacatatgaatcgtaaccagaaatttgttctactgctgcagttggatattctgcttcgccgcctaaaacgaacttgttgttttcgatcttaccaacttcccaagcaccagttccagtaacttctccagttaccaagtcttcaacaccgtttctaccaaagttaaccgtttgagttgcaattaattgctctgctttgcctggtttagtttggtaaatcttacggctaacacttgtaaacatgtccttgtacttaggatcagttggatctacgcctggagttgttggagtgatgtcctttgttccgtgaactaaaggaacaatgattgtattatctgttgtttgatcaactggataaacgaaacttggatcaactttccaattggttggaacttcactatcaatatcagccttcaaagtagaagcctttaagccttgattcttattgaagttaaaggttaacttgtctttgccattcttagtttgcattggagtattagtttcagcatcaatgtacttaacaattacagttgcattgtagtctgaatcatcatgttgctgtttactttgagttactggaacaactaaaactgcaggttgactagtaatattgctttcagccgctggataactatagccatctacaatactgtagttagctggtaaattactgttaataatattctttagttgctcagcacttaaacttgaacccttggcaatattaccaatagtgtaagctgcaacttctttgccatcatattggtaagaaacttgttggttaaagctagtcttttgatcatctggcttacctgaatttccatctttttcaacgttgatattagccttaacgtcaagataagtaccatcgttaaacataattcttacagtacctggaacattattagctacttctttagtagaaggcatttcgttaggagcccaagacatactaaatagtttactgttatcagtacctggaatataggctaaaacttctggtgcattagaattagtattttgaccattccaaccttctctaccaaggctattaacgttaattaaagtacgatattgttcttgagttaaatctgagatattactattttgcttaaagttcaatgttgaacctgtagtagcaccgtagaagttgaagtaattatttagccaattgttatatgcattaacacctaaacctaatttagaaacaacatcagcatcgttaattttgaagttataacgccacttagaatttcctggtaaactttcgcctgtagtagtctgctctgctggatttacttgaccgttagctaattgatacaaagtatcagctgaaccattagcaaaattacttacattagtgtttggtgcagaaacgcctggtaaattagtaatccaagaataagtaaatgcactagctgcaaatttatcgttcgcatctttttcgttgacatagttcttaccatctgtacttagcttataagtagttatcttcttgtaatcacttgctgaattaccagtaccattccagtcactgtagaatttaatagtactaatagcactatcattaaccgatggagtgaaatcaacactagtcttatgaacactggctactggagcagtaaaactagtcatcgtttgatcgccataataagtattatgctcatgatccataccagttacactagctggaacattaacaatcttgcttgagccatctttgaatgtaacaacaactggtacattaaaggaaccaagttgagcatttgaatctactgtttcagttactttacctgttgtttggtcaacatccacggtaacaccagttggagctgtgaaagttccaatcctatagttagaaacttcatcgtttggcatgtctgctggaattgttgggttaacagaaccagtattttgtcctgaatctggacgttcaacattcaaatgtggataagtaatgtgatatttttcagaatctttttcttctgtagttacattaatagaacttgctggaatattaatatctagataagtattttgtccttgagcatctttatcattgaaagtaattctaattactccgccttgatcttgaacaggcttagtttgccatgcggtggactgaatttcactatctggaatattgttttgaactaaagccttaaattgtgagctagttaaatctgaaccagccaaaatatcaattggctcagctaaagtcttagcaccagcacctttagcatcaatatcaaatgggttagtcttgtcagtctttccatcaatagtgatatcaattacgttattagcaatattcttaccggcagctgtagctatttctacaacagtattaggtgtattttcccaatctgcagtgtaatttgtaatagttgttggcgtagtagcaatttggtgattttggtcaatactgtaagattgaacagatgtaatcatgccactggcagaaataacttgtgaattgtcacttgtttcatgtgcgttagcattagcacgactaattgttactacagttgcattatcattattccaaataacagtttgagtacctttagttacaacaactggtacattagcattttgcttgctgccatctgcgtatgtaatagtaacaggaatgttgtaagcgcccggtgtagtgctagttgtaggagttaaagtaactctacctgttgaaggatcaattttgctccaagtgggggttgcttcagttcctgcaaaatgagtaccgtctggagtagtaattacttcgccaatcttattagtaaaggttggatcagttgtagctgtctttccttgttcaacactaactggcttatatgaaggagtatattggttatttgtttgtaattcagagccaaattttacaccagaggcattccaccaactaaagtgattaataaagctattcaaagcattggaagctgcagtttcagttccttcaggcacaacagaaccatcagagaaactgttcgaacccgtctcagaaggatttgcagttaaaattacttcgttaacacctttagctggagtatcagcattaacagaatcaatcatatattctgagcctggttgattccaagcaccatattgcttgtgggaacgaaaggcataggcaaagtccccaccttgactagtattgtttaagtacttgatgttccaagttactggatcactagcacctgctggcaccatggttaatggagtattatagttgctatcagctgaattaatcacaatgtgagtttgttggttagcgacatcaccagcaccatcagtcttaattaagtagcctggcttgtttgctgcagtacgttgtaagttaactaacttagcattagtgaagttaatgtagttttgactacttgaaccccacatagttaaaatagcaggccagccatttctatatgagcctttagttaaagtataggtatctggtaagtaacttgaatatgaggaatcttccaaatctaagctaccaccattcacatcaagatgataagttgcaccaagtccgtcctttggtcccattgcaagcaatggtgaatcagaatcagtcactttagttctaataattgaaagtaaagcattttgaccaactctcaccgtgctatcagcagtcttgccatcataatctaagccaataagagcagctgatctccaaccagtggtattcatcttgctagttgtaacttttaatgaagaattctcttgtaaatcaagatcgctagcattcataattcccattgaggaaccagagcccaactccatcgttactttagtattaggcattaagcgaacaacacctgaggttgcattatcaatagtttgatttcctgcaccggcaccattaggaatagtaattccagccatgttagaagtattagcactgttgaaatcaactgtagtaccattacttactacaacattgcctgaaacgttaatattgctcaagttatttgaagtactgttattagcagctaaagtcgttgatccgttaaggaagttaacattattagcttgaatcaaggcattcccagttgtatttgaactagttaaattgccttgcaaattattcttaccctcgaagttaacattagtacctttattattaaggagttgacctgagtcttgactcgtagtaacgccgttaaaggtaattgcatcattattagcagcagaattcttaaaccagaatgggccataaccactaacagtttgcaaacttaggtcttttaagactacgttccagctatgactagcagtgcttgctccttgatcatagtgcgtattgtcacctaagctaatgtagcgattgcccatgtctaaaccatattgattttgaccatcaatggtaacttgacgcgcactaccataattattaattgtttggtaagtattattactcaagttagtattactaaagtcaatattttgatttaatttaattgtatttacgttagcatcttgtaatgcattgatgaattgagaataatcactaactgattgttcttgattatttgatgtgttttgagcttgagtaattgagtttgtctgaacagtagactttacttgcttagttgcagctgtttttgctacagcgttagtgttagtagtttgctttacagactcatttttattagtttgaaccttattatcagaaactacctctttcttttgtacattagtcgtttctgcagttctattagtgtctaaagtaatgttttgattattagtttgatttttaactaggcctggggcttctttggaagcttttgcagtattagtaacatttacttgatttggatttaaggtatcagcttttacgcttttactacctgcaccaagaccgaaaatagtaaagccaattaaaactgaagcagctcccactgaaaattttctaattgagaaacgctcttttttattttccatcttccgaattttttcttgataattattcttagataacgttattgaatctcctccgtcaattctacagacctttcagtgttaactatagttcttctttttataatattcaaggatttaataacatatattgtttaatgcagaactataaattacgctctaaatatcaatagcaaaaattaacagaaaatcaatatgctattcagttattttatgcttaaaatccttgttatagcatagtgtttatacgtataagcattttattattgaatagacaattcaaaataaaatattgtattttcatttgcaaaatattaattaatattagccagggtataaacgcctgttattttaaaacaaaaaataaaaataattaaaaaaggagccgtatactacacgactccctctttaaatctctttatctactaatactatcagcacggcctttataatcaccgttttcagttccgataattaattcttcgccttctttaataaaatctggaacagttacaactaaaccagtatccatcgttgcaggtttaccaccgccagcagcagttgcacccttgatttctggttgagtttctttaacagtcatctttacagtagatggtaagttaattccgattaatttaccttcatcagtaaacttaagatcaacatcaatattaggcatcaagaacttagcttctgctgcaaggtgttccttaggaattagatattgttcataagtatcagtatccataaagataaagttagcgtcatcatcataaaggtattgtgccttctttaaagcaacgttaactaactccaccttctcacttggacgcattgttttgtgaacaacagctccactcatcacgtcacgtaagtccatttgcataaccgtgttacctttaccaggcttgtggtggttactctttagtacttcaattaacttaccatcttggctaaaaatcatacccttttttaattcgattgcttgcatgttttctccctaaaattttctaatatacatatcgctgatctcatgattaccatactttttaataatcatatcagctctcttcttagttggttcgatatagtcatgtaaattcttcaagttaacatcacgccagactcttttggcaaaattatctgcttgttcaagcgggacgttagcccacttataaaagaaattatctggattattgcgattaatctcgagcattaaatggtagcgatcaagataccatttctctaagtcttcttcgcttgcatccagataaattacataatcaaaaaagtcacttgggggagcttgcccttctggaggcacctccagcaggttaattccctcaactaccaagatatcaggaacgctgacataccccaattcattaggcaccagatcagaaatttcctgcgagtatagtctatatggtactctttctttaccagctttaacgcttgctaaaaaagtataaaaggcatcccagttaaatgacgatgggaagcccttttgatccattaagtttttagctttaagttctgcattcgacattaaaaaaccatcagcagaaacttgggcaattgttttatctggttcaaggcgttcgaacaagcgagttattttctttgcaaaagtagatttccctacagcaacagacccagttactccgatgataaaaggtattttttgccatttttcgttataaaaggtctgcttagtgcggtagattgcatttttttggctcatattgtactgaagatttttcatcatgaaaatctccgcactaaattcatcgcttggagggattagtgtctgccacttttcagatgtcagatgtgtaaattgctcttgcataaaaaagccgccttccttctgccttgttcctagtatttttacattgttcagcctatcatatatattgagagaaagaaaagaagatatctatgaaaaaattaattctttttggtgattccctacttgcaggctatattgatggacgcgcaactaatattgtaactcaaggactgcaagaaaaattacctaaatttacaattattaataattctgtacctgggacaactactgaagaggcaattgatttttatgagttacgaatcaaaccttttaagtatgatctagttattctggccctaggcactaacgacgccaacatgcagtttggtttgagcgctggacgatatgcgcataacttacaagtattggtcgatttaattggggctgataaaacattattaatgggaccttcctatactaattggaaaattgctcaagatcaagcttggcctaaaactttgcaatttgaattagttgctcaagaatgccatgttgaaaataaaattccattcttaaattttgccaaagtaatgcggcagactggtcaccccaataaactattgcaaaaagatggtattcacctaaataaagcaggaaataagttattgattgaaagattagcagacctagttgaagaaaaagaattggttactgcatcgtaaaaaagcatcccattgttgggatgctcttttgtactccggatattttattcagttacttcttgctttcttaattcattttgttcagcaactctaaagaatggtaaataaataaaaataccgataatgattaaaatcacttcaaaaataatatttctccaatccattgaactcatatatgcctggaagaaaaacggtgtaaatgaaggatctacaatataccccattccaatccagtgtaaactttcagcaatataagtaagaataatattaataattggagcaatcaaaaatggaatacctaaaataggattaaaacaaattggtgtaccaaaaattactggttcattaatactacaaattccaggaataattgatagcttacctaatgcacgatatttttctactttgcttctcatcattagaattactaaagcaagtgaattaccagatccacctaaaacagcaattctaaacatctgtaaattcattaaatgagtaggtgctaatccctttgctactaaagcagcattagcaccggtagctgcaataccagttgcaaagacaattggaaaaattacattacttccgttaacaccaattaaccataatagatttcctaaagttacgatcaaaatataaccccataagctattagccaaaaatgtagctggagtcaaacacttcataatgaaggtagtaaaatcagcatgcgttaagttgactaaaattaaattagcaccatagaaaataaagatatttgctaatagcggtactaaggaattaataaagttggcaaccattgggggaatcgatgctggcaactttatctttaacttactcttttcaatcccgcggtcaatttcgacagctaataatccaatgataattgcaacaaatagtccatttgttcctaaattattgagactaatcttattattcttatcaacagtagttgcaactattaaaaaggtaactaatgagatcatcccatcagtagcaggatgaagcctacgatatgacttacttaattcatatgcaataccaaaagcacaaatcataccaaagattcccatagtcatattgtatgggatagttatttgagcataatgtgcgacagcccaatatttccaaccagcaagccattgcataaaaatattagctgttcgtggattatatctatcaagtacaattggtgggttaacaacaattaagaagaatgaaccaattaccaaaaatggcaatccgaaaagcataccatttgatatagcttgtagatgcttttcatttccaagtttttgtccaataggcgttaaaactttatccaatttagtaatcagtgaatcttttttagcagcagtttcagccattagagatcacctattttccttactaaagataaatacaacttaaatttgatatggattgaacttgaaagcattaggtataactttactgtcatcccaattttctctaattttgtggtattcgtcccaatagtcattgtccacttttaattgtggagtaaccttagaatcgacttctagaaaatgcatacttcctcttcccatctttttgccacgagtggtgtgcttgtctaatgcataatctggaatttcaggaacataacctagagcaaagttcttaataatgatattcttaagtaaatcagaagaccgatccttagttgattcacataagtaacgaattgcatgaacaaacatcatggcacgatccggctcattgtaactaaagttttgtctcatttgatttagactattaatcaaaattggagcttgtggatttcccattcctatatcttcaactgaaatagcttgaagtctacgccatagtttttcttccatttgcggagaagaaatatacatttcataagcaaattcacatgctgctcgttctttgccttttctgattgatttttgcaatgcagagataacttcatcagctgctaatccatttctagtcctagttctggcccatggatcagctaaaaattccttatctctattttgtggtacttcatttttcttaatatctttttctgacatcgtgagtccttctttcaatatataggagaaaacaatgaatattcaaactattagcgaaaagtttcaactgaatactgatgaacaaaaaatattaatttatatgaatcaacaccgtaatgaaattaaaaatatcaatattcgtgaactcgctaaacgaacatttacatctcctagctttatcgttaagacctgtaaaaagatgaagctttcaggatattcagaattggtctttctaattgcagatgcgccaaattttcctaataatactgaaaacgacttaaaagtagagtcatacgtaaagcctttttccaacttgatggataagcataaagactcaatgatcatgatattgggcagtggatactctcaaaatattgctaattacatgagtgaatatcttaatttgaatggctttcgttgtacatccaattcgcatcttgagatgcttagaaagcataagaatactttaataattatcatcagcaattctggagaaacaaagcgattagctgaactttgcatacaagctcagaaaaataatcgtgatgttatttcctttacaggagataagaactcaacaattgcaaaacactcaacgcttgcaataagctcagatacttttaaccccacttcttttgacagccattaccctcagctgttttttggtctaacactcatctattttgaattattaatgagtaactttttgtctaattaggtaccttcttaagacaattcttatactactttggtttttaacaattttgaatacttttccttgttttgaaaacatgtttccattttaaaaaacatttttattcaggcatcaaaaaaggcatccctaacgggatgctttttttacacacactactctacgtacaaggcttgcttaccttgctgattatagctagcctctattttctttaaacttacttttttatctttaacgccataaggatcatttacgtaaacaatccccttctttttattatatccagtaaccacacaagcatgagaagaaggtgtcacattaacctttccctgcttagtctgccatgtccgcatatcatttacccggtcatattttaaagtcgtaataatcattactgggtgtcctttagaaactaacttcaacaccctaacaaaatcattgccagtataattacgaattctcttagtatacttcttagcaacatcatagagcggctcattataaacacaccaccccgcgttttcgatactcatataaccaacaaaaccgacatgaggatttccgcgataatcattgccaataaaagaggaaacatgcttaatgttagaagacaattctaatttacttacattaatatcataataatttaggagcattgacagtgacgtaacttcacagccatttggcaggtccggtaattgcctttctaaggggacattcaatttttgctcaggtcttaaagtaagccagtcatattcattttgaattttttcaaaattaaggataatcccaactactccagctgtaatcagtattaaaattccatataaaatctttcgtcgacgtcgatatctctttgctctgcttattcttttcatgctgaatattctatatcagaaatgtcaaaacgcaaattaagttggcaatgtaagaattaaatagatttcatttcttttgtgcttttagcataagaattaaattaactttatttatactcgaaatatggaacaagaattaagttaatttaatttatatgctaaaattaaattaagaattaaattagttaaaatcttgtatcaactattattaaaattagaggttaacaatggtaccacgtgattcttacttaaatattttagataaactacgtaataaacaaatcattaaagtcctaactggagtacgtcgctgcggtaaatctactattcttcagttatatcaagagcgattgctcaagtctggagtaaatactaatcaaattcaaacgataaattttgaagatttagacttagtatcaattaagacctacctagacctatataactacatcaatgaacatctcattcctaacaaaatgaattacatctttattgatgaaatccaaagcattcctaattttgaaaaagcactcgatagtctttatataaaaaataatgtagatttatatgtcacaggatctaatgcctttatgctttctggcgaattagctactcttctttcgggacgctacatagaaatccctatctatcctttttcttttaaagaatttttacaaacaactgaactttcaaaagaagaagccttttcaacttacttagaacgaggtggatttccatttgctactgaattaaacgacaataatacttatctttcttacattcaaggaattatcaatacagtattaataaaagatatcctaacgagagtgaatcgcggtaatgcaactttacttgaagcaattgctagtttcttaactgaagccaacggcagtctcgttactcctgctaaaattgccaatactctaacctctaatggaatcaagactagcaacgccacagtaatttcatacctcgaaaaattagtaaattcctatttattctaccaatgcaatcgatatgatattgcaggcaaaaaatatctacaaattaatagcaagtattaccccgttgaccccgccctcagacgtgctcttttaggtcagaaacgtccaaacatgggcagcaggcttgaaaatatcgtgtttatggaattaaagagacgcggttatgaagtatatgtcggtagtcttaaaaataaagaaattgatttcgttgcaatcaaagacggtgttaagcaatattatcaagttagtctcacagtccaagacgataagacttataatagggaaattgcgccctttcttgaaattactgataactatcggaaaattcttctcactcaagaccccggtagctacaacgacaatggtattgaacaaataaacgttatcgactggctactaaaagagcaataaatttaaataaacccacaaaaaatggaatgccaaatttggcactccatttttttatttattcacataagtcttctcgtctaaatcatcaaacagtgggctcttctcgcctgtataaatcaagtcaagtttatacattgcacgtgaagtaattgtgtaaagcaattgcgtttcatcaagttggtgataattatcccttgaaacattccaagcaattactgcatcaaattcaaggcctttagctaaatatgatggcataactaaagttccaggcactaaacgctggttagctgacccaattaaagttgccttaatttttctttctttcaaaaccttagccacttcttttgcttcagccaaagtcttagtaataatggcagtagttaacttttgctcatcattttctactaagatatcttctaaagcattatattctttttcaagactgtcacgcttgtaaaaagcaggcttaggaccacgtctatcaaaggcctcaatcttttcaccttgccgcagaatttgcttagtaaaattagttaattccttagttgaacgataagacttggttaattgaacaacatcagtcttttcaggatcaaacaacttggaaatctgacctaaaagagtcttactttcatctttagtaaaaatagcctggttcaaatctccgagcatcgtaaatttagctcttgggaagttgtatttaaggtaagctaactggaatggagtgtaatcttgaatttcatcaataaaggcataacgcatttcatagtcagttctacgccctgtaactaaatcgtacaagtacaaatatggtgaaatatcagccatcttgatcttgccgtttctgaacctatctttaacattttcaatatgtgcttcccactcttcttggctaatctcccacttgcttaaatcaatcaacttaggaacagcacgcaagaagcgcaagtattgcgcacgaatattcaagaaacggttctgatgaatcttacgactaacttgctttaattgcttaattacaattttacgagctaagaagtgctcttctttagcacttgattcaaattcttggtctggacgatcatataacttattcaattgctcttgatctaacgattcaatcgtcttatcaacccaagccttcttagtttctggctcaattcttctatttaagctattaattaaagcttctttggtagcttcaattctgtttcttaaatggtaattttcattaaaaccatagtaaatttccttgatcttttctttatcaaaaaatggtttcttcttattcttgaaataaatatttttaaaaattaaaccattcttttcaaggtgcttagcatagcgagttaccgcattaaagaattgtaaggaatcttttaagttaacgatcttgtcattttgctcattatcttcgaattgttcaaataagttttcaacattcatccctggaacacgacgagaaacaaattgccagtaagtcatctgcaccatattttgttcacccatttcaggtagaacatttttaacataatcgttaaacaattgattagggctaaacataataacatcgctagaagttaaattcccgtgataacggtaaagtaggtacgccacacgttgcataatagctgaggtcttacctgatcctgctgccccttgaacaaataaaagatctgcactagtatttctaataatcttattttgctcacgctgaatcgttgttacgatcgacttcatctgtgtagaagatttttcgtttaagacatttaagagcatttgatccccaattgattcattggtatcaaacatattggtaatcttaccatcttcaattaagaattgccgtttcttagtcatatcaacggtttgcacaccatcgggcgcattataagaaactttacctaacttaccatcataataaatagaagatatcggtgcacgccaatcatagattaaaaaatgatcttctttatctgcaaaagaccctaagccaatataaatcgtttcaggatcttcattaggttcttggaaatcaactctggcaaagtacggtctcttttctagacgctgcaaagttgataattgcttagcagaatgttgccaggcattttgacgttctgctgacatttgttgctgctgatgaattgacaaggcagtatccattgaagttgaatagccatcataatctaatttcacatcatcaaaaaagtgcgaattaatattttgcgcttcattttgcgcatgttcaattgaatgatctaattcgctttctttctttttaattaagcctagaactttatctaaatgtttttgttctttttgttgttcagtttcttttaccaaaattaagtcacctatttctagtattagtaaaaactttgcatactattttatcatatgtatacgctttctaaaaggatttacaactttgagaaagtctcaattattatttagtcttttcttaattaattagttttataattaaataaaattacctagcgagatgaaaaagtgaaacgattctttaaaagtattctagttctagctcttttatttattggacttaactttgcttatcaaaagactgcgccagaaattgaaaaaacttttggaactagaaacccactcccatatttaacagccaaagtacaacaatttatttcacctgaaaaaattcaaaatgatgatacaaatgccgacagttccaaaggacatacttttgaaactaactctgcatctgtttatcttgacctctctgatcccaccctcaggcaagccgcaattgatggaatcaatatttggaacaatacaggggcctttaatttcaaaattacgaataacaaaaataatgccaaaatcatcattaaagcaatgaatgatggacagactaacgcggctggtttaactgatacgcaatataattccctaacagggcacttaattaaagcaactgtccgtttaaattcatattaccttttaaaatccaagttatggctacaaccacggtcgaatcgtcaacacagttgaacacgaattaggccatgcaatcgggttaggccataagaacggcatttccgtcatgtatccacaaggatctttctataccattcagccaagcgatgttgaagatgttaaaaaattatatcaagaacaataagagcgattctatttttaagaaccgctcttattttgtatttttcttttttaattggtgttgctttttaaaataaggaatccagaaagttatgacataacctactgcaatacctacaaaagtccataccataatatttttaacaaataaaccgataaacaaaccaattaagccaaaaatcccaataataaatgattgatctagttgcttcatacttatttctccatttctatcttaactataacaaaattatcttattataagcatatttttagacttactttgccttgcattttatactatatatcataaatgtttttagatatatttgcttatatgcaaacaaatatcaacactatacaaataaagaaatgtattttaataaaagaaaggaatggtatatcctttatggataatcagaaacaacctccctcgtattctcaaacaacaaacgagttattttcagatttagaaacaagttctactggcttaagtgagccagaagctcagcggcggttaaagaaatatggacctaacgctctagctgaaaagccaccaaaatcaaccttaatgatgctcaaagagcaaatcattgatccgatgattttgatcttattaggagcagctgctttttctgcaattttaaatgaatgggtagaagccagcgtaattttctttattgttgtcgttaactcaattattggaattattcaggagaaaaaagctcagtcttctctagcggctctcaaaacgatgagcgcgccaactgctacagttatgcgtggcggtattgaaaagatcatccctgctagcgaattagttatcggggatttagttattctagctagtggcgacatggttccagctgatttgcgtttaattcaatctgctaacttaaaaattgcagaagcctctttaaccggtgaatcaattgctagtgaaaagaatgcgaaagctgttctttcagtagattgtcctctaggcgacagaaagaatatggcttatacttcttcaatcgttacttacggacgaggaagcgggattgtaactaaaactggaatggacaccgaaattggccaaatagccggtatgcttgaaaatgatgatgctggtgatactccattaaagcgaaaacttaatacagtaggtaaagtcttaacaatcattggcttaattatctgcgttttaatctttgcaattggtgccttttacggccgcccacttttaccccaatttttagtagcaatttctttagcaatttcaattattccagaaggtctaccagcaactgcaaccattattatggcgctaggcgtgcaacgaatggcaaaacaacatgccttaattaagaagttgcctgctgttgaaactctaggaaacgcgacggttatttgttctgataagacaggaacattaacgttaaataaaatgactgtaactcatttagctaatggtgatgatttccttaataaaaaagttctaagtgtagaaaaagcaagtaaggattctaattcatataagcaattaatctatgcatctagtctttgtaacgatgctagttttaatttagaaaatcctaaagaagtaattggagacccgactgaaggtgcacttcttcctctagcacaagatttaggttactcggctcttaacttaagaaaagagtatccaagacttagcgaatatcctttcgattcaattagaaagagaatgactacggttcatgaaataaacaatgaatacgtcgcttacactaaaggtgcgctcgatgagttactgccactttgtgactacatctacacaaataatggtatgcgtaaattaactaagtcagataaagataatattcttaccttatcgcacaagatgtctgatcaagcattaagagtcttaggctttgccagcaaaaatatgctaaacctgcctcaagaaggagaaaatattgaacagcatttagttttcttaggtacagtcggtatgattgatcctgccagagatgaggttaaggcatcaattaagatggctcgcgaagctggaattaagaccattatgatcacgggtgaccacaaaaatacagcagtcgctattgctaaaagtttaggtatttatactaatggaaacactgttatttcaggtactgaattaaacgaaatgacagataatgaactagatcaagcagttaaatccgccactgtttttgcccgcgtttcgcctaatgataaattaagaatcattcaaagcctaaaacgaaataatgaagtagtagccatgacaggagatggggtcaatgactcacccaccctaaaggctgctgatatcggtgttgctatgggtattggtggtactgatgttgctaaagatgtttcagatatgattttacttaatgatagctttacaacaattacggcagcaattagagaaggtcgaaaagtatatcgcaatattcagaaagtaattcaatttttactagttggtaatattgccgaaattactactttatttgtagctacaatcttcaactgggatgcaccgctacttgctgtgcatattctctgggttaacttagctacagctagtttgcctgctttagctttaggagtagacccagcaagtaaaaatatcatgaaacataagccagtaaagactggaactttgtttgaaaaagaccttgtttggcgtgttatcagtcaaggaattttcgtcgccttaatgaccttaatagcttactggattggagagtcgtttgataatccaattgctggtcaaacaatggcattttgcgttttagccttatcccaaatgcttcgcgcatttaaccaacattctaatactgatccaatctgggttagaggcaataaaataaatgtttggttgattatctcctttattgtttcagcggtcctaatgggaatcattcttttcactcctaacttacaaactctcttccatttgactagtcttacttcaagacaatggttagtagtaattattctttctctcttctctatcctgcaagttgagataagcaagtggattaagaagctaattaaagctagacaaaaagaaaacaagctgcaaacaaccagtgactaacataatataataatttaattattatgagcatatttttcgacttatgatgatttaatttatataatataagtataaatttaacacttacatctggcataaagacttaaacaacctttatgccttccactttttggtaatcaaaataatcggtatcgtagataccaaaacagccaaattacttaatcaaatgtagtgacccccgaacttcggacacggatttcgggggttttactatgtctaaattaactaaaaaagataaattgaatatttataaagaatggactattgaaaataaaagatcgacatatttaagtaaaaagtatggaataggctcagttagtattaagtacttagtttcactcattcataggcatggaatggatatattagataagccccatacttattattcagcccaatttaaactagaagctatcaatcgggttttagtcaatcatgaagctgcttactctgtatctttagaattgggcttgaaaagtcaagggatgcttattaattggattcgctcttataaagaaaacgggtataatgtcgttatcaagaggaaaggacgacgaacccgtgaacaaagaactagagaaattgaagaaagaaaacgaagaattgcgtcgccagaatttaaagcttactgtcgagaacgcatttataaaaaaattgaatgccttggttcaaaagagaaaaaaccaaccaaaacagaaatagcacaagctgttagagaattaaggctagaacttgggttgggtgttaaaactatcttatcgattttaaatgatctaaataatgatttacctggtttatctagaagcaattattacgatatcctaaagcgtgaagatcaagatgaaataaggcaccacagtctaattaaacgaattaaagaaatattctttgaacttaaagatagatacactgctccaggttatcgaacaataactgatcacttacatagtgaaggctttataatcaatcgaaaaacagtctatcgtttaatgcgtaaacttaatttgattggatatcgtatgaaacgtagaagacgctacaacagctttgagggtgaaattgaaggaagaattaaacctaacttaattaaacgcaacttctttgctattagaccaaatatgaagtggtacacggatattactgaattcaacttaagaggacaaaagctttatctatcgcctattatcgatggctgtgggagagatattgtcgcttataatatctctcgtagtcccaacttgcagcaggtaatgactatgcttgatgatgcatttaaagttaatgattcattgaatggattagtatttcattcagatcgtggctggcaatatcaacataagacttatcaatatgaacttgcaagacgtggcattgaacaaagtatgtctaggaaaggctgttctccagacgatgggcttatggaaggcttctttggcatacttaaaagagagatgttttatggcaaagaatcaaactatgccaatctgaatgaattagaacaagcgattaaagattatattcatttctataattacgaaagaacaaagagtaaactaaaaggactgactccgattcaatatcggaatcaatccttagttgcataatattaataaagtgtccaatttttgtgggtcactacaaaagtagtttggctgttttttagtgattcaagtacattgtatatacttgacgttttcctatatttatttaaatagatttctttataactgctgcaagagctcgttctttaattttatctacatcaactttattacgcttttcatattctctagctaaaacgtcgcacaaatataattgtgagacttgccctgctacactaccaatattcataaactcactaactgacgtttgtaaactcacatcccctaattgagcaattggagaagtaagatcattggtaattgctaggatttttgctccatagtctttagcaacatttaatgaatcatacgtatccttagtatgacctgaaagagataagccaactactacatcgtctttattcagcaaggttgcaacttggacttgaatatgaggatccgactctgcattagcaattagtccaattcttagccatgttctctcatagtctctagcagactcaccggaatgtcctactccaaaaatatgaattcgctgagctttagctaataaactaactgctttttttagagtaggtggattaattaattcttctgttttttctattgaagaaattaaaactttactacttcgctgggaacttgtctgagccccatcatgtttcttagctgtagtcatcattgaatcttgcgctaaagcaatttttaaatccgaaaaacctgaatagcctagttttttacataatctaactatcgtagcatctcccgtattggtcgcctttcccagtgacttaatagtgtcataaattacacgctcagtatgagcagcaatatagttagctaatttattttctgactttgttaatttatctttattttgattgtagagctgaataaattccattttctcacgtcctcgtcctaataactatatcatgtttttactagaaagcgcttgcataatatttaaattcattatattatcttcttgggaggaaaacttcaaaattaaattaatttggagtatatttacaaatgaacaaggaagaatttatcaacaaaatccatggtggtttaattatttcatgtcaggctttacctggcgaaccactctatactgaagaaggcggcattatgccattaatggcaaaagctgctcaagaagctggtgcaacaggtttaagagcaaactctgttagagatattaaacaaattaaagaagtagtcgatctaccaatgatcggaattattaaacgagattatccaccagaaaaaccatacattacgccaactatgaaagaagtagacgaattgatggaaactggcgttgaagtgattgcacttgactgcactttacgtccaagacatgatggcaagacagtagctgaatttattaaagaaattaaagctaaatatccaaaccaacttttaatggcagatacttcaaactttgaagaagccaaaaacgcctatgaagcaggcgtagattttgttggtactactctttctggctacactgaggaaagtcctaagactgaccatccagattttgatttaattaaagctttagtcgatgatggtctgccagtaattgctgaaggaaaaattcacactccagaacaattaaagcaagtaattgatatcaatccagcaggaattgtagttggtggtgcaattactcgcccacttcaaattgctaaaactttcacttctgtttttgaaaaataataaatcataacgaaagaggcttaatcatgtctaagaaattttctcatgttgggcaggccttttcacaactaggtcaagccttcatgcttccaatcgccattttaccggtagctggtttgcttttaggtttaggtggtgctctaacaaataaagcagccgttggcgcttatccttggcttaatcaagaatggcttcaaaccatcttaaaagtaatgaacttcgccggtagtgcagtttttaataatttagcgcttatcttctcaattggactagctgttggtcttgctaagggagataaaggtacagctggcctggctggtggtgtagcttacttagtttataccgcaacaatttcaggcttgctacaaatgttttcacctaaaaacactattgatactggtgttttaggagcaatcgttattggatgcgtagtcgcttatcttcataaccactatcgtaaagttgaattacctcaatttttaggattctttggcggatcaagatttataccgcttatttcatcccttgcagctattgtaattggtgctatcttctttatcatttggccaccaattcaaagcggtttaactagtgctggttatgcaattgctaaaatgggaagctttggtagtttcttgtatggatttttgcttcgtttaactggagcagttggtcttcaccatactatctatccaatgttttggtacacagcattaggtggaactgcggatgttgcaggtaaaactgttgttggtgcacagaatattttctttgctcaattagctgaccctaaccatcatggcttatttacctatggtacaagattctttgctggtcgttttgctacaatgatgtttggtcttccaggtgcagctttagcaatgtatctttgcttacctaagagaaaccgtaaaactaatggtggtttatacctttcaggcggtttaacctctttcttaactggtattactgaacctattgaatatactttcttattcgtagcaccttggctatacgttattcatgcctttcttgatggctgttcattctatgtagctgacatcatgaatatcagaattggtaattcattctctggcggtttaatcgactatttactcttcggtgtcttacaaggaagagataaaaccaattggccaaacgtcttaattatgggtgttatttggttcttcctttacttctttgtatttactttttgcattaagaagttccatgttggcatccctggaatggttgttgaagataatcaagctgctgatcaaattatggcagctggtcctaagactgatgacaagctttacaatgaatcatgtgaaattatttcagcattaggtggcttagataatatcgaaactgtttcagcttgtgcaacaagattaagagtttcactaaaagacaataacttagttaatgatgatgtctttaagatgctaggtgctccaggtgtcttgaaagtagctggaggggttcaagctatcttcggtggaaaagccgatctttatagccaagaaattaatgacattatcactcatcctgacatgcagccagcaaataatccacaagtggataaaactaacaaatctgcttctactaaagtagaaactgttcataagtcagaaaaagttatttttaaagcacccgtaaaaggtaaatttgaagatatcacccaagttaaagatgaagtattctcacaaaagatgatgggtgaagggtttgcaattgaaccagaaaacggaaaaatctacagcccagttgatgctactgtcatttcgattttcaagacgaaacatgctattggccttaaaacaaaatctggcctagaagtaatgcttcaccttggaatagatacagttgaacttcaaggcaaaccattcacaatgaaagttaaggaaggcgagcaagttactcctgaaacacaattaattgaaatggaccttgaacaaatcaaggatgctggaaaagatccagttgtgatgactttgattactaacagcaatgacagagtttcacaagttgaagatatcgtaactagtggacaattagttgaacctcatgacgatgtctactctgcattaactaaataatatcaaatcaaaaaatgcacttcgtataactacgaggtgcatttttctttatctaatgaaaattattttcctgtttcaatgtctaaatctaattcaattgggcaatgatctgatcccataatgttgtttaaaatcttggtattgatcatcttatcttctaagttatgtgatgccaagaaataatctagcctccagccaatattctttgctcgagcatcttcacgatagctccaataagtatactttgcttcatctgggtggaaatagcggaaagtatcaatgaaaccagcattcaataattcagaaaattcttttctttcaattccagtaaatcctgcatgacggtgattgtcatctggttctgctaaatcaatcttctcatgagccacgctcatatccccgccaatgattactggtttatattgcattaacttagtaacgtaatttctaaaggtttgtgcccacaattctctaaaatctaatctttgcaatttctctccagagaatggaacttggacatcaataaaatagaagtttggaaattctaaagtaatacttctaccctcgccatcaacttctggaacgccgaatccatttgcgactgtaattggcttttctttagtaaagacagcagtaccagcatagccctttcttttggcataattccagtattgataatagcctggtaagtcaatttgtacttcatttgcctctacgcgagtatcttgtatggcaaagatatctgcatctaagtctgtaaaagtattaacaaagccatgacgcaacgcagcacgcaacccatttacattccaagacataaatttcataataatccttctttctataagcttactagtcagctctctcaccttttattgtacatagttggttcaaacagatgaaatatttcgatttctctcatctagtcttcaaatgccatacaaagaagccaattccaataatcaaggctaaaattccagtccaaatcaaaccagcatatgttccgccgaaaaagcctaaaattccggcaacaatcatcatggcaaagccagcaatatcaccgcctagaccgtcactattttcagttgaaatatagacaatcccgcttgccataaataagccgcaaaggagaatgccaagaatccctgctaacatatttttgtcagcaattattcctaaaaatccacctaataaaccttgaataaatagccatacagaataaacaatcatcaaaattccgattactaattttgtaactctcataataattcctcttctttcatctcttaagttagtatacttagctttaatattcaaaatttttgatacaatgtttctatcacaaggaaagatgagaatcacaatgcgaacattcgaactaattggcctatttatttacctagttttaattgctattcttgtaggtcgacaaattaaagtaagtagtgattttagaaataataaaatcaccgaagaaaaacatcaaaaactgactaaaagaaatactattctcttaattatagtgggcatcttgttaattctatttttgtatacgccttttaagattttaattttttaggtttgatataatcaaagtaagtaattcaaggagatttttatcatgaaaagaatctatatcgtccgtcacggtcaaacttatatcaaccgctatgacaaaatgcagggctggtgtgacaccccattaactgatgaaggaataaagggtgcaaaagatgctggtaaagctttaagcgatattccttttgatattgctatttcaagcgatttaaagagagctagcgacacttgtgactacattatcaatgaaaattgcaaccgtgatgagttgcagcatatcgcaacgccatttttcagggaacaattctatggcttttttgaaggaatgaattctgatgaagcttggcgcatgattggtggcccccatggctatccaagaagagatgaactccttaaagaagttgatatcatactattaaagactacatgaaggaagcagacccatatcatgaagcagaaaatgcggaggaatattggggccgagttaacaaaggctttgatttaatcagtaaattagatggtgctgaaaacattttacttgttactcatggctttaccattagaagtattgtttctcgctttgcgcctggcaaatacaacttggctcacggtccaagaaacgcatcaattacaattatgaatatgattgataaagatatgaaaattgcttcttataataaaatgtcagtttaacgcaaaaaagacttcaccaatttttgatgaagtctttttcttaatcttctttttgtaaaacaatatgttggtataaaatcactgttaataggtagtaaattacgtaaagcactccgaaaattgtaaatggaatccacagtttgtcatatgtattcattcccaagatggatttaaataattgaagtccgaataggacgtctaccacacctaaaactgctggtaaagcaaacagaattccaatttctttagtaattgatgatttcaataagctctttctcgttccaactttccatagcatttgatatcttggcttgtcgctgtttgcaccagataaaaccttgaacatcaaggttgaggcaagcattgctagaaaggctagtcctaagaagaaacccataaattcaaaaccagaagtcatacttgaaactagacgatattgagcagattttgaattagaaagatttacattaattccatctttttcagcctctggtgaactaatcatttgatttactgataatttttgcaatttttcaatattgttgaaattacttctaaaattattaactcttaaaagctcaatcttatttactttagccttaatttgatcatattgagcttgcgatacaaccttagcttgagcgtcaatatacggagtaagagacactaattgatattcaccctctgctgcaacatctgacttcttatttttaaaatcattaacagtaagacgtctagtatcatagtggttcacgtcatttttacgtgaatagtgctgatacataatcttattattcttgagctgattttcagaaatgtaaaggacgcgattcttttcttttcccttactttctacgaccatcttatagtcaaaatgagttgtagattttacagaaactttctttaattgattatcaactttttgattacggttgtataaaactacatcataataagtactttgcattgcctgctcagtcatattgttgaagtttaaacccacagtaattgctcctaaagcaagcgcaaatagtaatgatacagttgataaaattctagtatagtcacttaatctaaacttcaattgacctagagtaaaggaatgaagttttcgatacttgaaagataagttcttacgaagtaaatcaataattgctgtaaagaaggaatcaaaagtaaagtaagaaccgaaaacaattgtaaagaaagcaatgggaacggttttggtacctaattttgctgcatgcatcattgcccaataacctgtggcaagtaatgcaatacctaatagtgcctcaataaatttccataatttatttctatgtaatttaactggtttttgatcttcatgaagtaaattaattatattcgatttaactaacttatgacgattccagaaagcagctaaaaagaataaaattgcaaaaaatgcgatcgtccaaagtaaagctggtaaatagaatcctacaaatttatgaatttgtaagcccaattgtgagattaaaatgctagaaacgccttgcgttaaagcaactcctagaacagttcctaatagagtagctaataaaccaacaacaagtgtttcagtaaaaatcagtcttccaattttactaatcctagcacctagcatcatgtacatcccatagtctttctgccgcatgctcagcaaaaagctattagcatatacaatataaacaaaagtgataattgataaaagcgcaatcccaaagccaaaaacaatttgagtaatttggaaagcaatacttaacgagccttttaagaaagcaggattagttgctaaagtcataaacatgtagaagattgcactagcaaaagttaagccagaaaaaagaactaaatagtctttgaaccggcttttaattccggttaatgataatttccaaagcataattatttccttcctagtattaacgtctacctaattccgcaataatttcttgatagaattcttcgcggctcttgccatcctttttaatttctttaccaatcttaccatccttgataaaaagaatacggctagcatatgaagctgaatatggatcgtgagttaccatcaggattgatactttatctttttcgttcaaccccttcatggtttcaagaagttctgtagcactctttgaatcaagtgctccagttggttcatccccataaagaatagctggttcatgaactaatgcccgcgctgctgcaacacgttgtttttgaccaccagatatttctgctggatatttatttaagatatgatcaatccctaatcgcttagcaattttatcaactttaggattaattgcacttgtcttcacattttgaagtgataaaggaagtgcaatattttcacgattagttaagttctctaataagttaaaatcttggaaaataaaaccaatctcttgtccacgaaaatcggccatttggttcttatttaaaccagtaatatcgcgaccattgatataaacatttcctgtagttggttgatctaaagttgaaaggatattcaataaagttgtcttacctgaaccagatgcacccatgattccaacaaattcgccacgtgccacatcaaagctgatgccttttaaagcttggtattgtttctcacctttcttaccataagtcttggtaatgtcttgaacttgaactacttcactcatgattactctcctttttgttatagtgtattacgtgcctgttacactatataatacagacacaggcataaaaagtaaagcctgtttttcatttttttgaacttttattcttgtataatagaaaacggtattgtaattaaaatacgaaaagaggtttagtatgcagggaagctacttcttcaaccctcctcctaaatttaaataaataaagtaagataggatttttaggaggaaacatggatacttttgatgaagctcaaaaacgtaaaaaactaacctggccggtaattgcactgatggactttgttacagttattggttttgatgatattacttacaactttcaaaaccaaggactggcagttgttagtgactggattttattattaattttatttgtcgttccttatgaattgatcgttggacaattaggagcaactttttctgatgatggtggtggtttgtcatcttggctaagacatacctctggagacaaaatgggatatattactgcttggtgctactgggtagtgtctctgccttacttagttgatgtagcaaattctaccgttgtttcctttgcatggctttttaaaggacacgcattaagtgacaaagaaatgagtaattgggcttttgccttatttactgcaattatctttgtcatttttatatttttccaacaccgatttgctaattcattgcaatggttatccattatcggtggcggagcaatgtttatcatgactattcttttcgtaatcatgactattgtctacctcggcgaaggacgcacgattgctacgcagccattccactttaagaatttcttgccaacttttgatatgaaattcttaatgtcattaggcttattgattttcgctatgaatggagccgaatttgttgctccttacgttactgaaatgaaagatggacctaaaaactttcctaaagcaatgtacatgctagcaatcatgactggatttttaactatttttggttcctttgcattaggcgtattctttaatgctcatcacttaccagatgatttaaagatgaatggttcttactatgcctttcaagcaatgggtgaaaaatttggaatgggtaagtttttcttatatactttcatcattactcaggctctatatatgcttgctcaactggctgttttagtagacggcggagctagaatcttcttatcagatactgctaaaaagtatctacctaaacaattaactaagactgataaaaatggtctaccaattaacggttactggttaacaactggaatttgctccgttttactatttttaagtgctactcttccgtcagttaatgacatcttcaatcaattacttaatttaaacggaattgtatcaccatatgttaccggactacttttctgggcctttattaagatcagacttcatccagaaaaattcccatcacaatatgtatttatcaaaaacaagacttttgctgttattgttggttggtggtgtttgattattacagttactggtgcaacttttggtattgttccaattgatgctaaagctggttcagctacttggtggcatatgttaatcctaaacattgtcgaacctcttttaatgattggcttgggaattgttctaccattaattgctaagtggcaaagatcaaaagaaaattaagctataacataaaaatgctattgactctcggtatgtgtacttgagccaatagcattttttatttattgcaattaattatcgttcttgctttctagaaaaaaatatcttagtacttaataaacaaactagataccaaactaaaattttgactaataaaattaacatatcttgattaaaaaaactatttttctctatccaatctattaaattactaattggaagtagttctgcaaaaaattttaaccaagtaggatattcacttactggaataatcattccagctaaaataatcaaactacccgttacaatattagaaagccagtaaggattctcttttttcattccccatacagcacaaaaataagctaagagaacacttataaagatttcaaagggtaaagcaagaaaaagcctaggaataatatttactttattaagcactagtaaacctattactcccaaaagaattgtttcgagagaaaggacaactgccgcaattacaaattttactagccaatagtttttaaaagtaggtctaattgaaaaaatatcgtccagtaaattaatattttgatcataaactgtggacgctaccacaatgccaatacctgtagaaatacctgtagtaatcacgcttccgaccaaaatacgagaataatcttgactcgctccaaaggcaatcaacaaaaacataattagggatactaatggtagcaataaataattaactaaaattacgttaacactgtcaaaagttccaatcgaacgtagagtaacacgataggcagctttcaaaatatgctcaatctcccctctttaaaagctcgtttaattacaatattagtcattaatttagataaaactccaaagaccactacaactaaaatgtagctcattatccaattccattgaatagattcatgatagataatcctaattggtaaagttaacggacttagcatttgaaaaggtttgatacttgttctaattgcttttggaatacttaaaagtccagataaaagtaaaattggtaataataaaagctgttcataaacaattgcattcttgcttaaaacgaaaaacaaactaataaaatagcttaaaactgcagctgcaatccataataagatgatccctactaataattgaaaatctaagtaattaactggcatttttaataaccaagcttctaatcctgctaaaggaaaagcaattaaaccatacacagaagctggaatcagagtagccagtaaaactttttctctagctacaccagtatttaatagatacggtagagtcccttgaaatctctgaaagcctaatgcaccagcactagtagtacatgatgcccatgttcccattactcccgcaattaaccattctttaccgtcataagtttgcaaaacatagtgagccaaatattcataaagtagcattgtagttgtttcaataatcactaaatttacaaaataagtattttttatatataaacgtacttgaaataatgctaatttaataaaagacatactacacctgccttcttttcaactgatcagctactgctaaataggcatcagctaaacttgcattattttccacaccagcaaatttctttacttcttgaattgacccttcaaaatgaatcatcccaccgccgattaaaaagatcctatcagccaagctttcaatatctgacatgttgtgactagttaaaatgatacctcgtttttctgacgctattcttttaactaattgtctaatcgaaataactgattcaatatctaagcctgctgttggttcgtctaacattaatattttgggatgatttactaatccacgagcaatatgaagtcgctgcagcatgcctttagaataagcagatactttcttttcagctacatcgactaaattaacagtctccaaagcttcttgaacattgcttttaatatttctttctttaacacctacgactcgagcaaaaaattccaaattttctctcgcagtagcgccgtagtaaaatccacgatcaccaccaaaaacaatacccatcttcttcctagcttttcgtggatacttaatcagatccacaccctcaacttcaacttgtcctgaagtaggcactaagtaattagagatggatttaatgagtgttgttttgccagctccatttggtccaacaaaagaaattacttctcctgcatgtaattcaaaactaatatcttttattgcatgaaataattctttcttatctttataatcacgtgtaatgttgtcagctttaaatatagtatttgtcataattttctaaaattcctattggatcagattttatcgttttcaaaatttgctttgctttttcttcctctcccatcttataaaaagaagcagtaacaagttttttagtctcattaataccaataacattgcctatctttatatgctcatcaattgcactaagcgctgtgtttaccgcttggtcatactgtttatcaatatagtaaatataggctaacgaagataatgcttcacttaaatattcatcattgtatttatgaaccatttctacatcttgcaacataatttttttagcaatatctatattatttaattcaatttctatctgaacttggttgatagctatctgactataataccttacaagctcggtaagtttcatattaatatgtgtaaatttgtttatagcattattaagaataattttcccatttgcaagcaaaagtctagctaaaattaaattattatggtgattttcttgattagatagtattaattgaaaggcgacgagattattcagtagtgctgctatttcacctagatcattactcaaatttatatcagtaattaagctattactatgtttaaaaaactcatcaatatttttttctctttttaatagagttacatcaattctatgtaaaataacttctttagtttctctatcagtacacttagtatgtgcctaattaaatagtttcaaagcagttgatgcatcattttcaataccacataaagtagccatctttattaaattatcaaccgtgaattcttttaaaacatcagccattctttcttttaatacttcataagaagaatcataatctcccagtaccaaaactacaccatcaatccaatcacctaaatcgcgaatatctaattctaagagttctttttttacttccagtaccgatggcatttgtttatctaattttttacaatattcttttataaaaattcgtgggctatctgtttttcttaaaccaaaatctgttaaatactctggtgcttttatagttcttttatttgaataaattcctttaataatatttttagcaatatgaatacgttcaaataaaacaggagattcttcccatgaagcatctcctgttttaaatgaacctataaattgagtaaaattcaatttttagactccctctttaaccttttttaggtccgtgattccaaccggacaatacttttgcaaaatatgaaatcaaatttttatccatttcttttgctactttttctactgacatagttattctcctttcttattttttattattttatcattggatgttttaaatttcaataatatttttatgatattctaattttattttattattatcgctattctatagaaacttgtctagcatttaaatattttctcccattactctactcaaatactccggctcattgataattttttatacttcaataacataacaatttatgaaagctcttttatttgctattatttttataagttcttatatttataaatgaagacagtcttcatagagaagcaataaataacaaatattaattgctgttactttatataaatatctagtaaatatattaagaagaagtttttgatgttctgaatcatagtaataattcactattttcactactttttcccgtctatagttcaacaaaattgaaaatagtgaaacttattgttaataaaatatagtttaactaaattcttccggaagctgaaatgtatattaatataattttttcagtttaaactatgtattacaaagataataaatttgtcaccctatatacccttagaaactgtcaaattttttgtgtaaatagatctttctcgtaaattgtttttttaacgttttatttattcaaaataggattctaaggtatcctggacttgaccaaagcctttgtgaattcggttgaagtagcggtcattgtagctcattgcttggatgccaataaaagtatcaagcgactgttcagtcgggaactccgctttaggcttagccttgcgcttaatgacgttattaaaggattcgatcatgttggtagagtaaattgaagccctgatctgcttaggataattataaaaaacaagcaggtctggctcgatgtctttcaggtttctaatgacacgattgtagctcttgttccatttggcataaaaagcatgcaatacatcaacagcagccgctttattggcttgctggtgaatctgcttgaattcgttcatgattgcctcgcgatcgtccacgcgtactttagcgcagatgttgcgcataacatggaccaagcagcgttggaaatgagcttgaggataggtctttgccagtgctgctttcatgccgacaacgccatctgaaaggaaaagctctacttgctttaaaccacgagatttcatgttctggagcaacgccgtccagacttcaatattctcactaggcgcaatgcagtagtcgataacttccttgtgaccattaggcttgatgccaatggcaatatatactgcttctcgttcaaaagtttctcgacgcaacggtatatacgttgtatcaagataaacacaaaagaacttatcgctcagcttacgcttgtgataagcctcaactttaggaatcatttgcttagagatattagacacttgagctggactataatgactgccatacattttttcgatcaaattagctatttctctagtggttacacctttagaatacagctttataaccatatcttctaagagatcagtatgttgtttatagtctggcagagtgtgttgatgaaacataccattgcgatctcgtggcacttgtacctcaattgatccaaactgggtatcaattttacggaaatacgcaccatttctagaattaccagtattccagccatttctagcatagggatcatatcctaaaaaggcagtcagttcagattctaacatgtcattaacagcttgttggatttcatgacgaagcaaatcattaattttatcttgattgaatagagcttgagttatatttttggtaaaatcattcatgaaggagttcttctttctgtatgttttttttgttcaaaccaatcatacgagaaaggaactcctttttctaatgttttaggaaattaaattaaggaataattcatccttacacaaactattttacggtctctacccttaagtcgtgagctttcctattcccccataattatgtatggcttaagtgattttcttaattaactacctttgatacagtcagtttaatttcatttacaagtgtaaaaatttattatgatttcagagtaacaatagcatgctccacttaatatttatgtgcacggttaattaaagtaattatctctattcggatattgccgtgttcaaatatcctaaggtcacttcggaatcgaagtggcctttttgtctttaaaattgatttttatttaaaaagaaattataattttcatactatcaaataaaggaatggttatgatgattttctaagctatttatccaatataaaaactaaatttatgaaagcaggtgaattatttgatcgacaatcaaccaaaaaagactaaagcctttatcgctggcgtaaatttaaacgatcccaattttgactactatatgacagaactaagagaattagctctcgcaaacaacttagatgttgtcagccagggaagtcaaaaggctgaaaatattgtcgcaggtacatactttggtgtggggaagcttaaccagattaaaaatatggcccgtgaattacatgctaaagtcttagttatcaatgatgaattgtctcctactcaaatcagaaatattgagggcatgacaaagcttaaagttttagacagaacagagttaatcttagaaattttctctaatcgagcacggagtcgacaagccaaattacaagttcaacttgcaagattacagtatgaattacctcggcttcatccttctgaaaataatctagaccagcaacgtggttctggtggagcaagtggcggtttcgccaaccgtggttctggggaaactaaacttgaattaaatagacgtactattggtaaacaaattagcgcaattaagaaagagctaaaagacatcagtaaacaagaagaaatcaaatctgctagaagaaacaattctcgtctgcctcaagtggctttggttggctacactaatgcaggaaaatcaacaacgatgaatgaattgctaaatgtttttagtgacgaagccaataaaaagcaggttttcgaaaaaaatatgctttttgcgactttagatactagcgttagacgaattgatttgaaggatgatttaagtttcattctctcagataccgttggttttatttctaagctccctcataatctggttgagtcatttaaagctacattgcaggaagcaaaagacgccgacttgctcattaatgtagtagacgcatcggatcataatatggttcaaatgattaaaaccacgcaaaaagttctaaatgagttaaacatcactgatgttccaatgattaccgcttataacaaggctgatttaacagaacgtaattatccccaaattgaaggaaatgatatcttatattccgctaaagatcccgaatcaattaagcagttagctaatttaattgtcaaaaaagtatttgataattacgaaaaaataaacttagtattgccactttcagatggcaagaacttagcttacttacatgaatatggtcaaattttaagtgaagactttaaagacgacggcgttcacgttactgtaaggctatctccaaaagatctagaaaaatttaaagtaaatgctgtatagcagacaaaaagagtagatttaaaatctactcttttttcgtattatttataaatgattactgcttcattcttttctatattattccacacttttggcgcgtcattaggttttaagtttacacaaccataagatccgtcatttaggtaagcagtcttagaccagttttttcgccagctattatcatgaaagccacaaccagttaaagtaaatggcatccagtacttaacatcaactgagtatttagaaccatcatcatttgttccctttaagacacttggagattctttatattggatataccaaactccagtaggtgtttctaagtttttatgagcaattttagtttcaactgtaccagtaacgatcgtgtttaaagtaaccacgcacttaccattcttatatatccacagcttttgatcagttaaagaaacaacaatataactatttccaattccattattacttaagccatatccagttccatacgtactgaaaccttcaccgtagatatagtttttaccatttagctcttgcgtattattgactaaagcattttcaacagcagcaacaagctttttctcattaatagcccaaccataactttcattttttacttttgtaacttgaccatttggcaattggaagtcataagatttatgaagtgtagatacttctttattaatactgctaatcttattcgctaagatctttgtatctgaaaaaacatacttatcattttcataagttaccgttggaaaaatttccgaccgcttaaatacaaaagacttaccattaaccgtatattttacttgtcgatctttaatctgatttaacttttcttttgcttttaagagctcagtattctgaaaattccattttttacggctagggtagcgagtatgttgttcttcaaagtaagattgaacttttttgttcgtaattactttatcgctattcttctttaaaatgacttcgtcaccttttaaaaccgcactatttttagctttctcatttattttagcagtagcttttttaacagttagtttgccgactggaacattataaattacaacatttgaattaaagtgactagcattaaatttttccgcttcagcatttctttttgactggatatatccaactaccaaccaagctattaaaacaattactaagcaaattaaaatacctattagccacttacgatagttatttgtgggatgggtatttttttctatattcttgttattcattaaaaatacctgtttcctaaaaaatttcttttcattataacacaaaaaagaaggttaatctttcaattaaccttctaaaataactatgtttatttcatttaattatcttacacggattgcgtaatctggcatgaagtaacttgagatagtagcttgagttacgttttgacctggttgtggtgcgtgtacgtattggttgttacctacgtagatagcatcgtggtagtcaccccacattaagatgtcaccagcttgtgcttggcttacagaaacgtgttgaccagcaccagcttgttggtaagtagtacgtccaatgttcttacctgcttggctgtatgcgtattgtactaaacctgagcagtcataagcgttaggaccagttgcaccccatacgtaaggcttaccgatttgtgattttgctgcattaactacagtttgagcagcttggcttgaagcttgttgagtttggtgttgtgcaggcttagtagcgagtagtgttttgtgcaggtgcactgtaagttgctgcttgttgagtcttaactgtagtgttagcttgtgcgtagtagttagtctttgctggagcaacataagtgttgttagttgaagcagtgtatgtactttgttgtgcagtagtttgtgctactggagcttgtgcagctgctgaggtttgttgtgcagtagctgcagtattagtttgtacaggtgcagttgcaactgatgcattgttagtagttgctgcttgttgtgcgttgttaacgctagctacagcagtttgtgcatcggcagtagcattgcttgcaacgttagctgcaggaacttgacttacagctgccttaactgcagataaatcagcagtaagtgcgattggagcttcttcttgtacatcatcgcctgagatccattggtctccacctaagttgtaccaagtttcacccttaacagtcttaaccttcttgtatgtcttccagcttgattcatgtggtaagtacttaccagtttgttgcttgccatcttcgtagctgttccaaactgcaacactttcaccagtcttagaatttacttttacaacaccaatttgctttgcaggagcttggatagttgaagcttgtgcagtattgttaaatgataatgagtttaatttagctgcacttaaagttgcgatacctgcaacagcgaatgaagcagcagtggtaagtttgattactttagatttgatagtcaaaggtatttcctccataaaattcttttttcttaatattatcaacatagccgtcattaattaacttaaaagttatgctatgtgtctctttttttaattgacaatggttattgtagggtattaatattacagccctgttacaaagctaaatcattgtcattacatttcgcttattctcaatctttttgcattattcaaaacctactcattatcaagttttgctatgatttcatctatttttttagctgtttcttcccagttatcattatttaatacatgcgcttcttttgctaattcgtctgataaatgtaagtcgcgtttaaattcatagctgtttaatcgtttatcaatttcactcgcttgatcgccgcgtgctagtagtctttttttcaaaacagaaaaatcagaaacggtcaaataaataaaatatacctgctttcctaatttttctaaatatgatttaaccccatctgtttctactattaaagaaactaaatcattcttttcccaagctttttctaacgcttctttacttgaaccatattgatattctccatattttacatgttcaaagaaatgaagttttttaaagctctcgtcattttcaaaataatatgattttcctgggatttcaccttttcggattggtcttgtagtatgcgttactacacgaggaatattatatttttctgttaagtattttgaaattgtggtctttcctaccccacttggtccagcaattatgataattctttgcaaaatattactctcccgcttgaaatcgactattatatataatagtatttcactattgtaaaacatttctgtacagaaaagggagttttttaaatgaaaaaagctgacgtaaagattggacaaattttagctgctacttctgaggaggaacttaagcatccttttcaaggaaaagtagaaaaaatttacgaaaattctgctttgctagctattacttcatacgatccagaagatgaatcttcagttaatgaattaaacaataaaatggttattaactttaagaacttaaagaaagttaaatcacctgcacgtggaaaaacagctgcaactaatgatgtaaaaatttctaaagttcaaccagataaaactaaaaaatcaaaataaaaattaggcctaaacaagttttatttttttaataaaaggtatcgataatcatatgaaaaaaaggctacaaacattcttattttggtttatcttaatccaaccatttctagatatttattggttatccagaccaccacttctaaaattctcacttccatcgattttgagagttttaggagtttttattgctattattttattctttagcatcaaaagtaattggcaaaggttaaaaaaacaatggtggattattacttatattgcaattttaatcctctattcgctttgccatttattctctgttaaaaactttactggtgtagatccaacaagctttggctattcgacaaaagttgagatcttttacttaattcgagcttgtttacccttgatagttatctatatcacttcatacagtgattttaaaactaaatactttttcagagtaattcaagcaatttcgggtttatattccttaacgattgtcatctcaaatctcttggttttttcgctaacttcataccatactacaggagctaagcgaatcagtgccaatattttttcttggtttactcaaacaaattatccttttaacgctttagcatctaagggaatattttttcaagctaacactctatcagctattttatttatgattatgccgattatgctctatattctttataaagagtttaacctcttaaatatagtattagtgagtgcacaagccttagcaatgttaatgctaggaacaaaggtgggaaattttggcttaattattagcttagttattttcttaatcatcttcttattccatagcttaattttgaaaaataccaagttttcagccaaatttctaattacattgatctgcatcttagctgcttctagtgctatttttccttatagtccaacgcttagaagatcttcgcttgaaaatggcgtagctcaaaaaagaagtaatcttggtgacaaaaatagactcgatcaagacctcgactctggattaaaaagatataaggggcaaaaacaagaagaatatctaaagaattttattaagaaaaattattgggtctattctttaaaaaatgacttagttttagatcattattcctacaaaaatgatccctattattggcttgacgtcatgaaaaggccggctactgagcgattaaactatcgacatcttgaacaagatattcttagtcgcgtcatgaacaatgataaaaataaactcaataaactttttggtatttcctttagccgtgaaaataatattgctccgctagagcgtgactttttagcgcagtattattcaatgggattgctgggaacaatcttattaacagtaatctacatatttgttcttggctatggaattttttactggttagtcaataaaaattcgaaaactttattgatctcttccctgctcttatcgggcggcttcattttatttgctgccttttatgcaggtaatgttcttgaatacttatcagcaaccttagtgatggcatttatcttaggatttttattacaaaatatccgttatagcagaacagctaaaaagctaatgaagtaataaacaaaagaccttatcccgaattttcaatcttcggaataaggtctttttctacataaattcttctacttcaattctctcacaaaggtacggtcaggtactctaatcaagtaatatcgagctgcagtcttaccagcatgcattctaaggccgttataccaatttttcttgtaagtagcagtatatgttgccacataggcactttgatagcgcccatctgcttgaactaattgcttagcagaatatggaatagctgctgcttgaaccgacattggattcttaccatcagaaatggtagcgtaattgcttttaacagttactctgtttccattgctatagaaagtatatgtttgaacaggcgctttcttattatcagatctagcggtaacatagtatgaacgtttattaccagctgttaaaatcaatggctgatattcaattttactagataaaacttgtttattttctaaatcaggattgtaaaataaagtgatgctaaacatatagatcgcaccgcatagaagaactaaaacctctaagatgtctagcagagtagtcttccattcaaatcgcttacgatcttttacaatcatcattaagtgacgtttacgaatattttgtacgataaaaatcaaatacaaaacaagtattaaccaggccaaaatacctaaaatattccatccaagtgtcataaaggaccctccattttctttaatttaagtatacggtacttatggatgtttttaaaactttttttaatttgactttattagaaaaagtcgcgacaattgaatacgtagaaggtagttttggtatatagcgttaggcaaaactatggtaaaaatagctttttatacaattacaggacaaacgcaacgattcataaataaaacgggccttgatgcacatcggattgaggatgctcatcctcaatatcaaatgaatgataaatatattttgatcttgccgtcgtatcaagattttatgatggattctgttgttgattttttaacatataaagataataaagagaaccttttaggtttaataggatgtggcaaccgtaactttaatgatctttttgctcaaacggcaaaaaagatttctgttacattgtacgtaccgattctctatttacttgagctaagtggcaactcggctgatgtcaaaaacgttcgccaaattgtcaaagaagcttgtaaaaaggaacgaggcgcacaaaaagatttgccagttcaaaatccatctcttagcaatattagtttcttaagtgacttcaggcagaaaaatgaataaaaaatcttattataaagcaagtaactggaatgctgtcgaagatcaagtagatcgttctgcttgggcaagattaaatgatattgtctacgaacctcgtcgtgttccaattcataaagaccgagatgaattttcccatctccctaaagctgaacaaactatgctcctacatagctttggttctttagctctttcatctactctccagatgaaagtttcactttcaaaaattaagcaagatgcggaaaattccgaagaagctgctgtctataatgcattgcaatatttggaatcaattaataataaagcctatggtcatgctctgagtgaattttctacttccgatgagcaacgagatgaggcttttaattgggcaaaccaaaatccatatctgcaaaaaaagatgagacttttaaacacagtctatcagtcagagaatgcaattcagaaaaaggcagcacatgtttttctctcaactggtttatatcattcgtcattctttggacccctatatttattcggacagcataaattaccacgaacagcggaattgattaaatatgcacttagaataacgactttaaatggtatttatacaggaattaaatttaggcgtgactacttcaaactctctaaagaagagcaagaaaatgttcacaattgggtatatgggttatgcgatagattatatgctaatgagcttaaccacattcatcttttatatgaagacactggtttagaagataaggttgaacattatattcattacaccttaaacaaggcacttatgaacttaggacaagagcccaagtatcctgaaaatgttgaaactttagatcctactttaacaacaggtttgatggaaagtgcaatgattgaagatttcttcttttatacaaatgcccatccaattctaaaaatgcgtgaaaataaggagttagccctcaaggctaactccttattttgtctttttagctttcgtctttgattctggtttttgataattacgaatgacctcaattttctcttcaattgctttaaccagtaagtcgctatacttatctggatcagccacaattttatcacttgagccaaaaatatcgattctaaagtgtgatacatttacatattctgaaatagtttcaaaataaatatttacttcatattcatcttcattattacaaaaattgctaatttttttgtaattagcaaagggaagattaatgatgttactctctaatgcaaaagtcattggtcttcttccactaattgcaagttgcgtttgaataagtgaattatgcttaaaagcttggactgcttcaccaatcatcttagttgcaattttctttaatttagtttttgttatttcactatacttaattgtttcaagatcttgaagataatcttgttcttcaatttttttagttaattcttcttgtttaattttcacgataaaaattccttcatgtatccttttttcattactaagatactcaataaatcttattcatgcaaccgaaaaaagttagatttgattaatcaaactgtaaagcaaagctaagtagttccattaccttaagcatatcttctggtctaagatgatctgctggtttttcatctaataaacgcattctagaaaaggtttgaatttgtgctgcatttactcgtccatgaacccgatagcctagcaagtctagatatgtcggaaaatgattgccgtgtgaagtaatgggacagagcattaaataattagttttctcattgtatgaattagaggacactacaactgcagggtgcttccccttcatttcctgtccaactgatggtgaaaaatccgcccatacaatatctccttgtttaaatctaatcttcggcatgacgtaattcctccatagccaaattttcccaagcttccctttctggtccaggtacatcttcaaatttagcatcagaggtataaggattcgaaattttcggtattaagatcaaactaccatcagatttttgatgaattgtatactcagttcctacctctaccttaaacgaagcaggaagtgaaaagcctactgagttaccaaccttttgagttacaacatgatgaatagatattttcataagtttttacctcattaagttactttcaaaaatattgtagtactaaaaaagactaactttcaaaagaaagctagtctttttggcgagaaacatacaaaagtatgtcagggtctttgtttcacagccaaagtagcccatcatcagcacttcccgtgctttgacttctagagtccagatgatctctgtcaaagaacgcatctcgcgttttcctcgactcgtcgcatctataattatactaaatttttcttattttttctattattgcgcgtcttaaaaaagacctcgcccatcagctgagctagcataaagcccattgcaatcgcaattgtgacaattgccactcgtaaaattaagtcttctgcatcagacagctgcccttctaccattgcacgtactgcctgataggctggcacacctggcacaagtggtacaacaccgggaatgttgaaaacagttacggggcattttttaattcgagcaaatactaaacctaaaattccaacgcacagtgctcctaaaagattagatcctaatcggccaatgccaattcgattagccaaccaatacaagatccaacccgcactcccactgacaccgcataacacaagagcacggtgagggacattaataattaatccaaagcccacagaagcaagccaggcaaacactaaattaacaattatttctaaccaaaaaggcatcacatcacaccccataataacttaattgcaataccgatgccgccaccaagagcaatagcagttaaaactgcctctgttgttctagccatccccgacaataaatcaccaccaaacagatctcgcagagcattagttatcgccactccaggcaccaatgtcatcaaggatccgattaagatattatcgacaataagcttaggaaacaacttgcaagcaaaaatggtaattactcccataaaaattgccgtcaccatttcagctaaaaaacgaatattagtatagcgtttaatagctaagtacacagcatatgataagccgccaataacagctgctgctggaaaatcaatccagtcataatcatccataaataagaccatcaaagtcggactcaaaattgcagctccgataatttgaagccaaattggaaaatctggaatagaaattgaaatctgttgaagtctttcctgtaattccttcaaagtgattttttcggcagcaaattcacgtgataactcattaacccagtctaccaactctaaattaatgtttcttttcttaacttgcgtaacttgagtataggaatgttcacctaaactcataaatattccagttggagttgtaaaacatctagcaccagtaatacctgcgttgcgggctattctcatcatcgtatcttcaactcgataagtttcgctgccgccttcgatcattaatctacctgcttttaagcaggtatcgagcacttcagcggcatagtcttgactcacatgctctttattcatttttatcctctaaaatacttatctattcattattcattttttcaatatcgattgtcttgtcaacccagtttcctctaaagaagtctctttcgtgacttacaataattactccacctttaaactcaacaattgcctttcgcaaagaatctttagtagcaatatccaagtggttagtaggttcatctaaaaacaataaattagatggttcaaactgcatctttgctagtttaaccttttcttgttctccaccagataactcccttaagggactcattgcttgctgagccgtcaaacccattctagctaaagcttgacgtaattctctagggcgcaatcgtggaaattcttcttgtaaatattgcaagggcgtcatatttttattgggccaaacgagatcttgctgaaaatatgccagctcagcagttgaagataattcaaaattaccataaattggtttcaattttcctagcaatgtcttcaataaagtagttttcccaattccattaaaaccggttactgctaccttttcaccatttccaacagagaaattaaatgctgacttaactaacgcctgatcatacccaattaccaaatcctgagtttgcagcagcaagtttgaagctgtatcaacataggggaaaacgacatgcgcttttttattattttgtggtggcgttaaaatatccatctttgctagttgcttttcccgcgacttagcactcttagatcttgaaccagctttattctttctaatatatgcttcagtctttttgatttttcgttgctgattggcataagcttttaaataactctctcggtcagcttctttttgtcgtaaggcatgttttaaatccccgctatagcgagtaatggtgccaaaatcaatatcaataatgcagttggtaattctccctaagaaatcataatcatgtgatactacaataaaagctccttcaaaatcatttaaataatcagctaaccaatcaatgtggttaacatctaaatagttcgtcggttcatctaaaactaaaacatcaggattttgtaaaagaagtttagccaaaatcaatttagaccgctgtccaccagaaagcttagctacatctcgctcataacctaaatcagctaagcccagtcctgttgctactcggtcaatcttagtatcaatatcgtaaaattccttttcttcaaggagagtttgaattttaccggctttttctaagagagagtcatccccattttcaccatatttcacataaaggtcattcaattctttttctttttgaaaaagatcgctaaatgctgtttgtaaaaactctttaattcctatacctgctttaagtttggcatactggtctaaataaccgacatggagtttattttgccacctaacctcgccctcatcttgggtaatttcaccagttagaatcttaattaaagtcgatttaccaactccattttgcccagttacccccatatggtcttctttatttaaaacaaaatttgcgtcttcgtataaagttttatcaataaaagtttggcttagatttttaaccgttaataagctcattatttcctctagtctagattattttcttgatcttttaatttattttgttgcttagcatcatattcttgcaaagcattcaacactcttggccattgtcttttaggaataattagttggagtttattgtgataaattggaaaatcactggctttcatccctgttatttttgctagttcttcatctgttaaatgatacttggctacaatggctttaatttcataagatgcatgtcctctaaaatatgaaagaacataaaagaatgccgcaaaaatacctgcacttaaaatagccatcggcagagaaaaatgaaatgtccgttgcgcaataaaaaacactgcaataaatgcaatcagtgcagaaattatcccgtaaatgactggaaaatacttattttgcttcattttttatcatcctttttattacactagtttttcaaatattacattcaatttacgcaaataacttttttgtaaaaaaatgtaaattgtgttttattttactgcaataatcctcttatataatacagtttgttaagtaaattaaaaatgactttttaaatatcattagtgtaacacgattaccattcaattattattaaatttaaacttaaaggagtaaacactttgacacataagaagggaatttcagtggtacttattgccctactaggttgcggttttcttacaaattcagttacttccaaagcagctgaccaagatactaattttaatgtttctaaaagcctagttgaaaatacaattaaaccaactcttctcagtaaaaaatttaaagaagaacaaatcaaagaatttagagaaaacaaattagtagaaattaagtttgaagaaaaaagaattaatcatgaaaattctaattctcaattaggcaattaaaactttgccaacaaaagttgcagttatcagacaaaatcactaagatagaatcatcaacagatatcttaaaaaaagcagttagcgtttcgctagctgcttttttcttaatttccatcccatggaatcgtatcagaatctttatcataaataacataatttctaaagtcttctggatcattccagtctagaccttgctgtaagctattttgtcttgtttcttgattacgtaatttttctttctttaaacctaagctagaacggaccaaatctgagacgcgttgtaattctttagtagaagctacttgcattgcagcagagccaatccaaacattatgtccatgaatatagccactcttaatatcctgcgtacaactacgatagttcattgcaattgaaagcatatcatcaaaagttaggttagttttaacatacttggcaaagactttgagaatcttacgataatttgtgattgagttaactgacattcctttacgtacaatgtcattaatgacctgtctttgtcgcatttgtcggccgtaatcgcccttaggatcttctttacgcattcgaacgtagtctagagcttctttaccattcaagtgctgcttaccctttttgaaatgcgtgtgataagtaaaggtaaatggaacattaacatctacccctcctaaggcctctaccatgctctctaaggctttcatattaacttccatataatagttaactggggtatttactagtgctctaaccgttcgtgtagctcctttactgccaccaatttgataagctgaattgacccggaacatgtagtatcttccttcacccttgccatctcccttaatatcagctagcaagtccctaggaattgatgtcatcgttgcttcttttttctgcggattcatagttgctaaaatcatcgtatctgaatttccgcgatcgtgcctaccttcaattccttgatcaacaccaagaattaaaatagagattggcttcttctgagaaattaactgcgaagtttttccagtcccgcgataagcctgctgcaccgaactcatagctgagaaataagcatgagcaaaataggctacgcttccgcaaacaagtagaattgttaagagacctaccaggcgagcaaagttatttccattcttaatatcttttttattcgccgcaaaaacattatttctttctagttttttatttggcttattaggttcatctggtctcattaatttttgactcctctggctattagcttaccttttcatattacaaaaatcactggctaagcacattagtttcattattaaaaaatttttattttttagcaagcgaaataatgttctataatggtgattaataaaatttgtatcacagaaagaaggaaaaaatatggctcttccaacaagaaatgaagtatccgatgatcttaagtgggacttaagtcgtgtttttaagaacgatcaagaatgggaacaagaatataagcaggttgcacaagaaatcaagaacttaagtaaatttaagggaacacttgccaaatctggtaaagatctttacgaaggaattacagcaattttagctgtaaatcgacgcttagaaaaagtatatgtttacgctacaatgtcaagcgatgtagacacaagcaataatcattacctcggttttgttgctaaagcacaaagcttagctaatcaaatgagtgctgcaattgcttttgtcgatcctgaaatattatctattccagaagaaacccttgctaagtttatgcaagatgaaccacgtttagaaaattatcgacaccgccttgaacagattacgcaaaaacgtcctcataccttgccagcaaatgaagaaaaaatcattgctgacgctggagatgcaatgggtacatctgctaataccttcaacgtcttaactaattctgatatggaatatggctacgtccaagatgaagacggtgaaatggttcaattatctgacgggctatactcacttttaattcaatctcaagaccgcaacgtccgtaaaaacgcatttgacgtgatgtatgcaagctacggacagtttgaaaacagtcttgcttcaactttatcaggtgaggtaaaagctcacaattttaatgctcgcgtacataaatacaattcggctagagaagctgctttaagtgaaaatagtgtaccaacagctgtttacgatacattgatcaaggaagtaaatagccaccttgacttacttcaccgttacgttgcattaagaaagaaaattctaggcttaaaagaccttcaaatgtacgatatgtacgtcccattaactgggaagccagttctttcttataactttgaggaagcaaaagaagaagcaagaaaggctctagcaccattaggagaagactatttaaaacacgttgattatatttttaataaccgcgtaattgatgtggttgaaaatcaaaacaaggttactggtgcatattcaggtggtgcttacgatactgatccatatgaactacttaactgggaagataaccttgattcactctacactctagttcatgaaactggtcactctgtccactcttggtacacaagaaacactcaaccttatgtctatggtgattatccaattttcgttgctgaaattgcttcaactactaatgagaatattttaaccgagtatttcttagataaaattactgatccaaagacccgcgcatttgtcttaaaccattatctggattcgtttaaaggcacactcttccgtcaaactcaatttgcggaatttgaacaatttattcatgaaactgatgctaatggtcagccgttaacagctgacgtactcgatgaattttatggcaacttaaaccaaagatactatggagatagcgtagaacctggtggagaaattgctatggaatggtcacgtattcctcacttctactacaacttctacgtttaccaatacgcaacaggttttgcagctgcaactgctcttgctaataaagttgttcacggcactgagcaagaacgtgatgcttatattaatttcttaaaatcaggctcttcagattacccaacagaaattatgaaacgagctggcgttgatatgactaaggctgattacttgagggatgcttttgatacttttgaaaaacgtcttaatgaatttgaaaaaatcgttaatgaattaaacgctgaaaagtaggattcacatctaaataagctggtagatttaatttctaccagctttttcattagctattttatttatacatggcgacaattttttctaactcttcattaggaatcaatttcaaatttctaacaaattctgtagcttgttctaaggtgctaccattatccatttgattctcaagaataactttggcagaatctacttttccttgttctacaccgtcttttctaccttctgcatatgctactttccctgctattttagcagcagcctgttcacgttctaacattcttgtctcgtaaagcataatcttctccctcatttctggatcttcgttgatttccttaattcttctttgcgcgtaatcgaaatgcttatttaatctaactggctcattattcatcagcttagccaaggcttttaagtcttcgctctgaccctcagctgaaacttgtgaattaatgataatctttgtcacgccatcctgcaattgtttcgacctatcttgatctgagtaagtatggtacgactcgtaaaatttatcatctttcttaggcttaaaattacagagaaaaataatataggcgtcttttaaatttcgataggtcttgcctttatttaaagtatagcgtagatcaagtcttgaaagataatagcgcatgcgtctaccaatatcatcctgatccgttgtttgcatttcgatgttaaacaagcgtcccttatgatcagtgactaatacatcaagtcgaacttctttagcatcgcttttacgctcaggattattgatctctacttgttcatccaaccagtcaatagtcctaatcttcaaatctggaataataatttcaagcaaatacttgcaaaaatctttgttttccatcaccatcccaaagaccttatcttccgtgaacccaaaccagggttcaatcttttttaccatatgagtaaatcctctctaaagatatttgaggagtcatcccatatgtttattacgcaaagcggggatgttttttctgaaaaaatactattatatcccgataaacaaaaaagttcttaaccccaatgaagttaagaactttttcattacaccaacttagtcaagaaaccaactaaataaagaaatacacaagtaatcaacaagtataagcttccccacttaacggtttccttcaaaatttttccttctaagccttctttattaatcgcaccagtagctactgcaatattctgcggtgatagcatccctgctgtcgcaccagtcatgtttgacgctacaatccagtacttgcttacacccaaagattgagcagccgagtactgcaaattaccaaacaagacattagctgaagtagcagaccctgttaaaaatgtaccaagtgctccaattaacggtgcaaataatgggtaagctggtccaagcaaacttactaaagccaaagctaaggcattcgtcatccccgcataaaccattaccttagctagacccacaattgcacacactgtaacagtcgtcatgccaattgtctttaaaacattgactagaattttgaacattttattaaagcttaaaccctggatttttccaccaattaagccagctaataaaattaatgttcctagagaagaaagccagttaattggaagatcatttggattctttcctaaataaacatgtaaatgggtagttacactagttaagaagttattcacaggtggacaaagggacgaagcaagtaaaacaaaaacaaatactaagatgaatggcgagcaagcttttataatctcgctaatactttcattttctacttcttctactgcaccagtttttcgctttgtgagccacactgtaattaaaattgagaacaatgatcccactaaagccggaagttctgcaccagtaaacttagcaatgatgacttgcggaattgccattcccactcccgacattaaagtaataaagacaattcccttaagtgctctaacacttttaccagtaagaattaccaagataaacggtactaaaataaccaaaatgaccagctgtaaagttacaataaagcccaattgcacctcattaagattagttacttcagctaatgtcaaaaccggcaagccaattgctccaaaggccgttgctgtactattagcaactaagcaaatcacagatgcttgaattggctctaagcctaatgaaatcaaaattccagcacaaattgccactgctgtaccaaagccagcaatcgactcaagaaatcccccaaagccccaggcaattattaacactaaaattcttttatcagtggtaatagacgatagcaacgtttcaatcgtctgcatactccctgattcagttgtaatctggtagacaaaaagcgccgccaaaattacatacataattggccaaattcccattataataccttccaaagctccagaaagagtattaattaggggttgtttaaacattaaaacagcgtccgtgatcgtaataattaatccaatcgtacatgctcttgaagcagacatcccaataattccaagcgagattattaaccaaagaattggtatcaatgcccataagaaatttatccacataattttcctcatttaaaaaagtaatactatttaattttatcctttttccacattttaaggaaatttaaaaaacaaaaaaacctacaaaaacagcttctgcttttgtaggtttcacaaagattactttttaattgcatgtacgccataaacgaataaataaattccaacttcaataattgaaataaagaaagtcactggcaaattagttacatatcctaaaactaatcctgcccaaacaccaactaaggcaatcccaactgaccaatataacatagccgggattgttttgcctaaatagcgggcacttgaagacggcaaagttaataagataaagaccaataatgatccaacaacttgcgcaccaattgaaacagctaaggccaaggcgattaaaaatactaccgaaactaaacttgtattaatatgatggctaattgcaccaacatggtcaaacgaatcataattcaactgtcttaaaactaagaaaatgattgctaaaacaaagagagacaggataactagttgaataactccctctctatcaacgccaataattgaaccaaacaagatattagtagcgtagcgactattaccaccagcaatagctaaaaatagtacacctagaccaataaataaggctgaaattgcacttattgcggattccttttggtcgcttttcattgataattcaccaacgctaattgaaccaagcaaggtaaagagaaccattccccataaaggaacccagccaatccacactgcgaaagcagccccagcaaagccaatttctgaaagagtatgggctaaaaatgaaaatcctctagctacaacatatacaccaactattccacaagtaatagcaataaaggtactagctaaaaatgcataacgcataaaatcatacgcaaacattattcttcacccacctcctcagttaagtctttaattttaccagctactagacctttgtctttaaacaaaagatagtccttcatatatttctttgctaaaggaatatcatgagttgtgaataatacagtcattgcatgcttttcattcaaatgcttaattaacgacatcaattcttctttagcaacaggatctaaactagcggttgcctcatctaaaataataaaatctggcttgtctagtaaggcttgagctaaatatgcgcgttgtttctgaccaccagaagcctcacccattctggtattttgaatatctaacagatgagtttcttttaaaatttgatttactcttgtctttacttgggcatttttaaacaaaggagtattgagttctacaaaagccctaattgaaagtgggtaatcagcatccaaatttctaaactgaggcacataaccaactttagtatcagttgcaaatttaaacgagcctgttgttgcttgtagcattcccattaaaattctaattagggttgttttacctgtaccatttgcaccaagtaaggccgtcattgatcccctagttaaggcaaaattcaagtccttaaaaattaccttatcttcaaatttcattcccaggtctttaacagttaagatattagtcatctcacccttcctctctttatttcataaactgatcctatttattttcgatattagctagattttgataattttccttcatccaagttaagtaagtagtgtgatttgggatagtttcacgaacgtttagaactggaacaccattctttttggctagcttaacaaaagatttaaccgttgagctgcttgcctgcgtattattaacaaaaaaggctgttttcttttctttaatatcagtattcatcttgttaatcatcttaggacttggatctgtaccattctcaatggcttcttcaaattccttgtcgcctatcttataacccgcttcctttaaagcataatcaaaaacgggttcactaacaaagactggctttttattgctcttatcagtcttaactagcttcttaattttatcaaccttagctaaatactttttaccattagccttaaagtaagctgcatgcttcttatctagcttagataagcgtttaactaaataatccacatacttagttggcatatttaaattgtaccaaatgtgaggattatcgccgttctttaatcccattaagtcttcaccaactaaaactggctttttattaacagatttagctaacttattcatccatgagtcataccctaagccgttagcaacaataatatttgccttagttaacttcttagcatcagcagttgttggatcaaaatcatgtgggtcaacactacttttatcaataattgccgtagctgtaccatattttccaacaatatttttagcaatgtctgaatagacattagttgttgtaacgatagagatcttatctgattggctagccgcttcttttttattggcacacgctgtagtcacaagcgctaaaagtcccactagcccaataatagaaataatttttgtaattttagatttaaaattttgcatatattttatcctcctgtgcaaaacaaaaaagcattaagttagaaaattcagcataaattctaacttaaagttagactaagctactttttttattatgtcaataatttttagatagacaaatagcaccaagacgtctcagacttgatgctatcaataagtgtaaataataaaaattttgctgaatttttaatttaatgcttttctctaaaattacatctttatataaacatatttttatatctttgtcaaaagagattattaaaaatcttccttaacgtgctgtcttaaaacatccaaaatcttaattacatgtttatcttctaaactatagtaccgctcctgcttaacctgttcacttttaaccagtttggcttcctctaatattcttaagtgtctagaaatagcaggctgactaacatcaaattgcttaactaaattatttacactacttttttgattatcatttaagtaataaagaatttgaattctaataggatgattcaaagctcttgtaacccgaataatttgctcattcaactttctcacctaatttactttgaattatgcaagtaattcaagtattttcttttgtacgcttgaatcctcacttgatccaataatttgatttgctgcctttttagcttcaggcaaggctgttgctgtcgcaaaactagttcctacgtacttaagcattgcttcatcgtttccgctatcgccaaaagcaatcatctcactagattttatccctaatttcttaccaagatattcaagcccaacagccttattcatccccttagtctgcatatcaattgaagtgcttgcacctgctacaaaatcaatttgcgaataaagtgaacgcaactcagctagaataactggcatgatttcagctgggacgtttaaactaactttaaaaatacgatcatcaatttctttaaagttatcaacaacttgaattttattaaaaaatttagtcatctcttgagcaaatttttcaccatcactttttcttacgcaagcactagttactccagcgacaactgcttgatatggcaaatttgaaacaattttcaacattaaatcataatcgtcatcagatagatctgcaattttaagaatctcttgtccatgagcaactaaagcaccattttccgcaataaagtatatcttacgattatagtctggaaaacgtgaaaaaatattctcatactgattaccactcgcaactacaaatttaatatcgcgatgttgcataatttgaaattctttttcgaagagtttcttatcataagtcttattttcttttaaccaagtaccatccatatcagttgcaataagcttaatcatgtttaatctcactttccacttttattatccacactccactatactaaaaaactatttttatgcaactagcttagtctaattcttcttacgttttctagtgccagctaagcctaaaattgacgcaattgttgctaagcctagtccaataattcctacattagcatgtttatgtcctgtttgaggtaatgaagcctcattagtcgttgctgcttctacctttccaggttcgttatgttctacagttgagacattcttagctgtattatcaatagaaatattatctggaagagtatcagcgtcagatttgtctggttctgttgtttcagttggttgtttttctgaaacttctggctgttcggattctactggagcttctggttcttctggcttttcaggctcttctggcttgcctggttcaactggttgttctggctcttctggcttgcctggttcaactggttgctctggttcttccggcttacccggttcaactggcttttcaggttcttccggcttgcctagttcaactggtttttcagaattcttactgtaaactacggtttcagtaatatcctcagtatcactatctacattttcaacactgccaatttcttttttatcggccgtgtagccagcaatttctggagaaataacctgtacaaatgttgtgccatcaagtgcagtccacttaattccatcagaaacttttctaccattttcatctaaaataatgatttcaccagtcactttatcaattaccgctgtaccacggaatcttaaagtttgaaccacatcatcctttgccttagttccgtcagcgtaaacatacttaattgtacgagtaatggtcttatctaaagcaattgaatcaaatggatatttcggaccttcagggttgtctggattaattggatcgtcctctgtgaacttatcatcaggagtaacagtaattgtaccgtgcttgaatatcacatagaaggtcttagttgtttcgccaaatttaccaccagtgtaaccgtctttaactagttcgtagcctaaactttcgtagtatttgatcttgtcagctgtactgtaattgattgactcattgtatttgccatcaaccgttgctgtttcaagtgctttacctgtagtttcatcaacgtagataatttcagctttcgctgcattagctgtgtagacaactttggtttcaagattattactatcttggttaatgccttcaactgcattcacaactggctgatctggagtgtagccactaattgttggagagatcacttcaatgaaagttgtgccatccttagctgtccaagttaacttacctggaattggtttaccattttcgtctaacttaacattaccgttttcatctacttccacgtattggccagttaccttatcaatcacaccagaaccagtgaacgttaaagtctgagtatgacttggtttagctacagtaccgtctgcgtaaacgtagtaaatagtatgtgttacatctttattcaagtttgcagagtcagttggatattttggtccgtctgggttatcaggattgattggctcatctggttttcctggattgtctggatttactaccactgtaccatgcttgaatgttacatagaaggtcttagttgcttcgccaaattcaccaccagtgtagccatctttaactaattcatagcctaaactttcatagtacttgatcttgtctgctgtactatagttgattgtttcattgtacttgccatctactgtagctacttctagctctttgccagtagtttcgtcaacatagataatttcagcttttgctacattagccgtgtaaacaactttagtttcaatattcttgctgtcttggttaattccttcaactgcattcacaacggtcttatctggagtgtagccactaatcattggagaaaccacttcaatgaaagttgtaccatcactagctgtccaagttaacttacctggaattggtttaccattttcgtctaacttaacattaccgttttcatctacttccacgtattggccagttaccttatcaatcacaccagaacttttgaaagttaaagtttgtgtatgacttggtttagcggttgtaccatcagcgtaaacatagtgaatagtatgtgttacatctttattcaagttagctgaatcgcttgggtacttagaaccatttggatcatttggattaattggttcatctggttttccaggattttctggatttacaactacagttccatgtttgaatgttacatagaatttcttagttgtttcaccatattcaccaccagtatagccatctttaactaattcatagcctaagctttcatagtacttgatcttgtctgctgtactatagttgattgtttcattgtacttgccatctactgtagctctttctagctccttaccagtggtttcgtcaacgtagacaatctcagccttagcagcattagctgtgtaagttacagtatgaacatagttttcactatcatgtgccacattttcaacaccatcgatttgcacgtgactaggtgtatgacctgtaatttctggagatataacagctaagaaactgtttccaagcatagccacccagttcaatttaccaggaactggcttaccatctgcatctaacttaatgttgccatcttcatcaacttctacatattcaccagttaccttattaatgtggccagatcctgtaaatgtaattgtctgagtatggcttggatttgctgttgtgccatcagcataaacataatgaacagtatgtgtcacatctttatttaaagcaccggaatcagttggatatttaacatctccgcctggattaatgttttcaccaggttttccaggattttctggatgaacatgaactacaccatgtttaaatgtcacatagaaagtcttagttgtctcaccaaattcaccaccgtcatagccatctgcaactaattcgtagcccaagttttcgtagtatttaatcttatcagctgtactgtaattgatgacatcgccgtattttccatttagcattacagcttctaattctttaccagtagtcttatctacaaaaataacctttgcatcggcatcatttgcagtgtaagtgaccacaattacattgcttggcatatcatgggtcactttagttccagcaacattagctttgtctggtgtataaccagttatagtcggggagctcacttcagtaaacttaggatctgaaacgtttgcattccatacaagtttgccttcaattggttccccatcatcgccaagaataaccttaccgttttcatcaagaactacgtattttccagttgtcttatctacaactccataagcagtaaacttaacagtttgcttgttactttcagctgctgcatttccatttgcataaacatattggatctcttgagttacttctttgttgtaatcttctgatccatagactggactgtcaggatctttaggatcaataatgatcaaatctctagttaaatgaaccttaaacctgttcttggcctcttctgcagaatagtagtaatctttaccgaattcgtaatcactacttacaagtttgtagccattattttcaaacattttaagcgtagcttcaggatttaaattccaactaatgatgtgatcaaccttaccattaacagtatcactaccgataacttttccagttacatcatcaatatattgaatctgagcagtttgctgatttgcatagtaaagaacttcctcagtgatgttatccgagttaccacttactaaaactgattctacttgcaacctatttgcaccgtatcctgaaatctttggtgaatttacttgagcaaaagtatagttagcattgccgtcttctgcagtccaaacaatatcgctaatccaaactttatctacaaagtcatattgaccttttccaataaagctaaccttttgagtaacagaactagcagctacttgccctttattaggaccatcagcatagacatatgtaatgacacgatttacttctttagtttgtgagttttcagatattttatgtttcagcgtaattacatagtcattgcagcctgggttatagtctgcatctccaaagactgtagtatatcctaaaggattattcactaaaatgtagccattattttcgtaattcttaatgctgcctaagacgttatcaataacctggtaattaattacttcaccataatttccagcaatattgatagtagtaccaagttgtttttgagatgtttcatcccagaaaacaattgttcctacctgagcttttttatcgtaaatgatattttctatctttaacttttcattctgctctactttatctgctgtactccacttttgattagtagtgtaaccaatgatatctggagatttaagagattcaaaagttgtcttatcagcagtccattttagactagcatttttattagtaatctcagtagcaattaagtcattacctacttgttgggtaccagcaactaggacaatatttccagttactttatcgcgataaccagtagcagtgaaagttgctgtctgagtagttgaaggacgtagctcattacccactgtatctacatagtgaatatctttttgaactgtttgcgattcattaactgcttcaagcacatgctttaattgaatttcaaagtttaaatcatgtacaccaaactgtgttccaggcctatagttattactaataactacatatccaccatcaatcaaacttgctaatgtagtattcaaatcaacaaagttaatttgagaatacactttacctgtagcgtttaattgagcaatactattacgatcattatccatgtcaataattgtaattgttgccttggcatcttcacgtaaacggtagacaaccttgatgtcctcaccaggattttcaggaattacatattcaatatcagcaatatatcctgcgataatcggcgcatccgttctaccagcctctgttggatcagttaagttattattaaacttcacagcatctccaatttgattaccattttcatcaactggaataattgaccccaagtccttgtaaataaactgtacttcatgagctgagtcagttacgaatggatttcttgcagtaaagtttttatgagtaaatttaactgatttaccagcttctacagtatgactttcaatcacacgatccatgttactgccgtcatacataagaacttccatcttacctgtagcatcaatttgacggtaaaccacagtaaagtcaactgttaattggttaacagtaccttctgttctattgccagaactgtagtaaaccttcttgtagtaactaccatcaccaaattgagaaatagttccagtaaatgatccactaggaatatttgagccatctaaataaaagccatcaattagttgtttgtattgatcaacattatcgataacaaattcttgtcctgtccaaccagaaacactaacattaggatatttatcagtacctggaatttcaactaaattaccatctttattgtggtagtagtacttaattacagattcttcagtatgaactggaataatttcaccaactgaacttgcatccaagttagtaatatttcctaggccatagacaatttttgtgctacccacaactgtcgtagcattaccaacaggcattgaactaccaccaactgtgatattagatttaccactgtttacaattaaaaagtctctatcgctaacttcaatttttttgaaatatccagctttaatgatatgctcagctatcagatttttataatcagcatcagtcacgtaagcatagagattttcatcagttaaatcattacggtttacagatagaataagtttcttattactactattccaagttccagtattatttaaattcaaaatctgatatatatacttgtcattgccaattaaagcaccagcttctttgggatatttatctgtatcagttgcaggaatagtcacagaagccttactttgaacttctttaacatctgtttgaccggtagtttgattgttttcttctactacagtttcttcaattggagaaactgcattttcaatcttcgtttcagcttcaacaggagcagtttctgctaccttatctgtaatctcagttttaggtacttcttctgttgcaactatttctgtgctttcacttgaattattcgtttctacgctaactgccttatgttcttcgttagctgtttgaagattttctacattagtagttccttcttcaacagaaggaatactatcgtttttggactcattattttgttcatatgagggagttaaattaggctcaactgcttgactattacttaagtgttcagttgcttctgtacctcccccatttgtattttgagcagtcagattattatcaattgttgtattttcaacttcattgtttgtttctattgaagccacttttgcttgttctgcattcagagcttcactttgctcttcagtacttactgtattttcaacattttcttttaagctatcagctagattacttgttacatttacactctcttcttgagcaactgtagtatcagctttaactgttcgaccattaactcccataaaggttaacccaatcaatacagaggcagcccctacagtaaacttacgaatagagaagcgtggcttttgcggtctaattttccgcattttttcactataattgttcttggaaaccataattttaccctcatacttctagtattaggtgagtattaagttatagctttcatgctagcgattaatttatatagtaatcgcttacttcaccttttataatatttattttttacaataagtaagtatactgaggatctatgatccaattgtgtacaatttgtgatttttgtgtgaatctgtggcttgccgatgttataaattatttgctatatatcaacacataatgcggtaccataaataccataattttaatcctatacaaatcgtaaatttctatatgttatttaatatacaaaaaaagcaagatccgataaaattggaatcttgcttttaaattaattatttttactcatctggatctttagaaacaggtttcttccagaaactcatgattaatccagctacaatagaaccaataattgtagcaacaaagtaaagtagaatgtggttagataatggagatacccataatccaccatgaggagctggtacttgaatatgccataatcctacaagtaagccgcccactgcagaaccaattacacaggaaggaataacacgacctgggtcagctgcagcaaatggaatagcaccttcagtaatgaatgagaatcctagaatccagtttgaaacaccagcacgacgttcttctttagtgtaacgattcttaaagaaagtagtaccaattgcagtagcaaatggaggaaccattccacctaccataacagctgccatcataacagctgcagttgcagaatgcgggtcattagcaaaagcacctgaagcaaagacgtaagcagccttgttgaaaggaccacccatatcgatagccatcatccctgctaggattaaagttaaaattacgaggtttccagtccccatactattcaagaagtgggtaatagcaaagttaattgaactaaagattgggttgatgatgtagaacataatcaacgcaatgaagagtaagcccaagattgggtagatcaacattggcttcataccttctacagattttggaagtttagcaaacaacttcttcaagccaatcatcatatatccagcgataaaacctgcggcaataccacctaagaaacctgctggagatacagcatgagcttgaacattaacttgtaagccgttagtcccattaacaatggctgccatgtaaccaccaacaaatcctggcatcaaagcaggcaagtcaccgattgactcagcaatataagcagctaaaactggaaccatgaaggcaaaggccaagttacctgcactgtttaagaaaataaatgcaggattcttagcaccaccagccatatagttttcaacgataaaggagatggccattaagataccaccaccaataacgaatggaagcatgtggctaataccactcattaagttcttgtagatcgaagcccataaaccttgtttttctttggcactatcatcgttagcactagcattactatcagcatgataaatcggagctttattttctaagatatcttcaattaactcttgtggatgattaataccatcaacaacaggcttcatcacaagttctttgccatcaaaacgtggcatttcaactttcttatcagaagcaataacaacacccttagcgcgtttgatctcttcaggagtaagtctgtctttcacaccttcagaaccattagtttcaattcgaacatcaacgcctaatttcttaccagccttaattaaagcttcttgagccatataagtgtgagcaataccattaatacatgcagtaaccccaacaattagaggtttttgctcattagcaggcttagctgcttcttttgcagcttctgcttttcttttttcagcatcagccttatcttgagcatctttttcagcttcagcctttttaaaaatatcaattacttcttctggcttagttgctgccttcaaagcattcacaacatctggattaattaataaactagataatttagctaatgcttgtaagtgcgtattatcagcaccagctggtgctgtaatcataaagaataagtgaactggttgaccatcaagagaattataatcaattcccttaggactctttgcaaataaaacagcagcacggttaatatatttgtttcttgcatgtggcatcgcaattccatcgccaataccagttgttgattctttttcacgagcccaaattgatttaatgaattcgtcttcgttatttacaacgtcttgctttacttcaagatcagccatttctttaattgcttcttcttgagtagtagccttaagatccataatcattaaatcaggacttaaaagatcttcaattttcatgaaagtaactccttatcctaattttattttttatttttaactactttacttcttcaactgtaatttgtggcaaaacagtatcgatttgactcttaactgcaatgtcttcagtaaatgcagtagctccgccgcaagcagatcccacttttaatgcttcaacaacatcatgagtcttgtagtaagtacctacgaaaccagcaatcattgaatctccagccccaacagagttaactgcagtaccaacagcggcacttgcatgataaatgtggtccttagttactagataagcaccatcacccgccatagaaatcatgacattttgtgctcccatatctaaaagcttcttagctgcttcaagcatttctttatcattagcaaaactagtattaaataaggctgccaattcatggtgatttggcttaataactaatggatggtacttcaaagttgcaagtaaagcttcaccagttgtatcaattgcaaattcggcaccggcttctctaatagttggtaacaattgctcatagaaatctgttggtaaacttggtgctaaactaccgcttaatacaacaatatcgccttcattaagatcatccaaacgcgccttaaatgcagtaatttcttgttcatcaatctttggaccagccgcattaatttcagtttctttttgagcatgaacttttacattaacacgggtatcatcagaaatagttacaaaatcactttcaatttttttaacgtttaattggcgaaccaattccttgccagtaaaaccaccgacaaagccccaagcagtattatcaacatcaagttggtttaagatttgcgaaacattaattcccttgccaccagctaaaaattgacaatcatttgaacgattaacgctaccagcatcaaccttttttaattgcataacataatctaatgctggattaactgtaacagtataaatcatgaccgagcctcctcaactctgatttgtttaggtagaagattcttcttgcctatatttaaatggttagtgatgagtattgcctcattgatatgtgcaaagcttgcaaaatttgctgctccaatcttactactatccattaaaacgaaagcttcttttgcttgttcaatagcagtcttttttattccagcttctgcaggatctggagtagtaaattgcccttctgttgttaaaccgttggcaccaataaatgaaacagataaattcatttcctgcagttgtttcattgcagtattacctaccacagcatgtgtttcaatcttcgcctcgccccctaacaagcgagtctgaataccattctctaaacatgctaatgcaatatcaacaccattggtcaacacatgtaaatccttaatttctcgcaaaaatgacaccatttcatacgttgtcgttccagcgtcaaggaaaatatgatctccactagtaatatggtttattacggcaaaacgagcaatttcacgcttcttatcaacattaagattaaatctaacctgctgttcaacatcgcgtgaataatcttgcaatgaacgtgcaccaccatgtacacgtacaattacaccacgtttttctaattcaatgaggtcacggcgaattgttgactctgacgacttagttaacttacataactcattaacacgacagatactatgattattaatataacttgctatcgcttgttgacgttcttcagtcagcatcgttcatcatcacctcgtttaatatgataaacgctttcaattataaaatcaatcatttttcttcaaaatcggtcatattcattcattattagtcataactaacttcatgaaaagctaagcctaaataaaaaagctaacgacttaatcgctaacttttaatttattatcaaatttgtatatacttttgatccttaaaaataaagtctattttcttgtccatagctctaagctcaattctttgatagatcggttgatagccatgttttttcaaattaatacttgttctatttttatcaatatttatctcatacaaattatattcaccatttttataagcaaaatcagcaccattatcttgataatgcgtatagttaccatgttcgccaaacactctaaagatcatcttttcatctggtttagataaaatatgattcttcaattttccccaaggcaaaatcgtatctttcttaataaataagggcaatttatcaagcggcgcattaactaaaattgtattgttaccactatacgtaacattattccaaaaatcaatccattcaccttgcggtaaataaacagctctaaagtttttcccttcttcaactaccggtgcaactaaaattctcgtaccaaccatatattcatcattcatatttttaaccattgaatcagttggatagtttaaaactaaaggtcgcataagtggtaagccgtttttactttctttgacaaacaggtcataaaggcaaggaataaagtgataacgaagctgcaaatatttacggtacgttgataaagttggctcgccaaatacccatggttcctgcgagcgtgttcctaaagctgcatgatttcgaagaagtggactaaaaattgcagcttcaatccatcttgttaataattcaggtgtagtatcagcaccaaatccgccaatatcagttcctgcaaatgcaaacccgctcattccaagattgcataactgcggaatcatcatttgtagatgaacccataagctttgattatcaccagtccaaacagtagaatatttttgcgttccagcataagcagcacgagtaatcacgaatggtcgcttgccacttgctttttttaagccattataagttgctttagccatattatgaccataaacattgtgtattttaccatgtgttgattttttatcttcatcactaaaaatgatatcttcaggaatttctccattaaatgaagctggttcattcatatcatcccaaattccgtcaacgcctaaatcaactaagaacttacaattttctgcccaccattttctaactgctttacgaccaaaatcaggataaaccgcatccccaggccaaaccttattaacataaacttgaccatttggcgccttgacaaaataaccttttttaagtccttcttgataaatctgataagattcatcttttttcacacccgggtcaataattgtaataatgtgcaaacctaatttatgcaatttattgataaatttcttgggatcgtcataggtatccgtccgccaagtaaaaacacgatagccatccatataatcaatatctaaatgaatcgcatcacatggaagatgatatttacgcattttatcaacaatttctcccactttctcagcactaatgctgtatccccaacgagactgttgataacctaaagtccatttctgcggcagcggcgttctaccagttaaataggtatagttttcaacaaccttttttaaactactgccgccaataatgtaatagtcaatatttccatcatcagctgcatagtagtaatacttattgctttcttttcctaaatcaaaataactatgatacgtattatcgaaaaaaatcccatagggatgattgttttttaaaccaattaaaaatggaacagatttataaagtcgcgtaaagctctctacttggggctctggattatcagtattccaattttcataagcatagtggcgtttatttaaaaatcccgtcttatctcccaagccgtaaaactgttcgtctgctgataattccttaactagttcataataatgactattcttttttgtaccaactgctacttcatgtccttcagattctgctaatttttgatgagtggcatctacttgccgatcaagcggaattcggttaccgcgataatcaataattaatggattttcttgttcatcgtaaacatcaattttttcatcatcataaattttaataattagttttgaagtcttcagttcaaaataattagctatttttttaactttaaaacctgtttctttagtcttacttccttcaattgcataagaattattgctacacccgcgatcttgaaatacacgaactatttcagaagttaaaacagataaagtaagaatggaattagtaaactttattttaacttgattgcgatcgattatatatttttccaaattatttctattcatattcagcctcatcatcttgtattcgcctgcaattttatcataaaaaagaccgctctccttttgaacgaagagcagtcatctaatataaatttttattcttttattccttgcaatgcacgtttcatatttttccacatgccattatcatcagtttgtaaaattaaacttgggtaaatttttctaatccacaaaatcgatcccattaaaaatatcactaagattaccattgaaaccccagcttctagatttgtcgcatttcctttaattagccgaagtggcattaagaaagaagataaaaatggtacataagacataattattgcaaaaatactgtcggggttattagacaaactcatgctgctgaataaaccaagtaaagtcaaataaactagaggttgaaccgccttattagcatcttctgccttagttacaattgcaccacaaaccgcagcatagacaatatataggatcaatcctaaaatcacgaatactaatccccatgaaattatttgtcctaaaacttgatcaattgccggttttacttgagcaaaagtttctttaactctatcaatttgtggagctaaataataaaatccagaaaacattagtgcataaattattaattgtgtaagaatttccatgaaaatccctaaaactttaccatcaaaataatttccacctggcatacttgaaaagatcatttccatgatcttagtccctttttcactggcaatatcttgcgccataatagtgctataagtctgaaccaaaaagtacaaaacaaaaatcaaaatccaaaaagtagccgttttcaaatttttctcatcatttgcatccagctttttactattagttttttcagtaaatttaactttttgagaaagtgattttagctgctgctcactaagttttgcattctttagattaagtacttgttgctgggcgtttaaacctcgcatcaattcttctttaagatcactatcaagtctttccgtaccatagtaagtcgcttctaactgagcagaagtattttcaacgacaatatagccactaacgtctccagcctgatatgctttttcagcttttgtcttattcttatacatatcaaaatctttggttttctttaaaggctgaactaaaccctcgttttggctcacaatacccacttttgtattatcgtcaaaagccgaagacgaactcattccaaagaaaaatgaaataattaacacaataaatggtgcaaaaatcatcaataaaaatgaccaatttttaacttccctgcggtaggtttctttagctactaaccaagtcttattcattattttcaccagctttcaatttaaagatttcatctaaagttggtggttcttgatcaaaagtttgcaaatattctccatgagacaaaattttaaaaatttcttggccataattagctgctgctagccaaagcttataaataccattattttgtaaaatagcattttctaccccaggtaatttcttgacctcatcaagtcctaaatctgccctaataaatagacgtgttaagccaaaattatttcgcacttcatttaccgtaccatttaaaacaagatgaccattgttaatcatcactacatcatcacataattcttcaacattagacatatcatgatcagaaaatataattgttgcaccacgccttttttcttgaagaattacatttttaattatttcaacatttacgggatctaaaccactgaatggctcatctaaaataattaaatttggctggtgaataagtgttgcaattagttgaatcttttgttggtttcctttagatagactcttgattttatccgtagtcttgcccttaacttctaatttctgcatccagtcctgcaaatcatgctttacagtatcttttttcatgccttttaaactagctaaaaagctgacttggtctaaaactgtgagcttaggcatcagactacgctcttcgggcaaataccccacagaattatagtcacggcttgaaaaagaatgattatcaatagtaatttcgccctgatacttaacaaacttcagaatgctatgaaaaagagtagtttttcctgagccatttttaccgattaagcctaatatttttccattatctgctttgaagttaatatcaaataaaacttgtttacttccaaagcttttattcaaattttttacttgtaacatagctttttctttctaaataaattctattaaagttatgcccaattatatcaatattcctcctagaaatctttttttataccaaaaaagcccctcagctgtctaaaactgagaggctttatcttatttatacatatattttgcagttgcttctttaggatccattccattacgaatcttcaaagcaagttcaattgaaacatcagcaataattgactgaggatcaatcacattataaggatgatctggtgccttttcttgagcaagcgataattccgtacatcccaataaaattacattgcaaccatatttatcatgcattgtcttcaagatcttatgatacaaatcatgatcaacaatacccttttccttaatatcactgtaaattaattcattgaccataggctgaatttcgggaccacctaattctaccttcttgccaacgcgttctaattcgtccaaatacaaatgatcatagatagaaccttcagttgcaattaagccaattttttcttccttaggaaaatcatctacaaatttatgcacagcaatccgcatcatgtgtaaaaatggtacatcagttaatgcagccaaatcgtcataaaaataatgtgcagtattacatggcattacaaagaaatcaggattaagctttgcttgacttaaaacatcatcttttaaatcatagaaaaagttaggcttactatgatccatgatataagcagttcgatcgggaatttgagcatcatttactaaaatataattcaaataatcttggtctttagcgattttaactcggtgattaattaagcggacataactttcagttgcgattgtccccattccgccaataattgagaaaaagtgcttcataactattcctcatcgtctttttctaattcattaattacactttcagccactttaatatcagttggatatggtgtatctactccgcgaatcttttggaatggatctgcacccttcccgcaaattaaaacaatatcatctttattagacattgcaattgcatcatgaattgccttttcacggtctaattcaattgtgacatcaactttttcatgatcaatgccagcatcaatttcttgagcaatatccattggatcttcaaaaccaggatcatcagtagtcaaaaatgccttatttgcatatgcagtcaaactttcactaaatccagggcgacgtgatactcccttatccccaggagctccaacaactacaatgatctttggattattgaattcacgttgcataaagctcattaaggctatcattgaggccttattgtgtgcatagtcaacgataactgtcccatggttctttgatggtaaagtttccattcgacctggaattgttacgtgacgaattcctttagcacattctgcatagctttcaccagcaagaccagcaccaataattgcagcagtaccattcatctcgttgaagtcaccaatcatttgaagagtgtaatctccagcgattggtaatttcttagctttttcagaagcacagaataacttaaattcagtttccttcatgtctgtttcaactgattggaaacggaaatcaattggttgttttaagttaggattttcgaaatcatttctagcaaacaaatagatactatctggattagtagtcgtagttgctgctgcataaatttcatcaaagtggtctgacattgcgttaataatacacttacgcgagttaaccattaattgtaatttacaatgcagataatctgcgaagttagggtgttcatttggaccgatatggtctggagtaatatttaagaaaaatcctagatcataggtcaaaccaaagacacgatttttcttataagcttgactagaaacttccattaccaaatgagtcataccattatcaacagcggttctcatatcacggaacaagtctaaactttcaggcgtagtcaaactagacttgaacttatcttcaggctttggtccgacaatatcatctactgatgaaaataaagctgttcgacccccgttaatttggtcaagcatccctttcaagaaataagcagatgtagttttaccttttgtaccagtgaaggctacaacatataaatcatcttgcgggaatctgtaaaaagcagccgataaaagagccatggctttagttacgtctctaacaactaaagcatgcattcctttaccttctggatatggttgttctgctacataacaagtagctccactatctttagccattgataaataagtaggtctaaagcctttacccttacagaaaaacaaggtatttgtttttatatcacgtgaatcatatgaaatataattcattttagttggaaccgcatcttgtactgcacttgacttaagcaagtggtgttccttcaaaattaagatgcaagtgtttaaagaaatgctagaatcgctcattttttctccccaattttttaatcaattcagcctaaattatagcacaccatcattttgctttggggctattgagtggtagttgaataataaaactagttaattctgatgttgactgacacttaattgtcccgccatgtaagtcaacaatacttttcgtaatcgctaaacctaatccagtaccgccggtttttaaatttcttgaactttctactcgatagaagcgatcaaagattttttgtaaggacttcttaggaatctgctccccattattttcaactctaagttctacaaacttattattcaccttattggcaattaaattaatttcagttgcgccatgaccatatttcaaggcgtttgaaatcaaattatttagcattcgcacaatcattttagcatcagcatcaattactaaatctcttggtcgtgttactacattaaaggtaatgtttttcttttctgcttctaattcaaaaccagctgctacctgttcaagcattgaattaacatggagcggtgctaagactagtttattattcgttgacgaacgaagcgtagtgtattcaaataagtcttcagctaaagctttcatttggagagctttatcataggcgattttaatatatttagcttgatcctcatttagttcactactctttaataaacccaagtagccaataattgaagttagcggtgttctgatatcatgagatacgttagtaatcaaatcatcctttgattgctcaatctggcgctcttcttccattgaagctacggtactatcaactaaagcgttaattgaatcgattaccttttgtaaatctgtctttactacaaaaggaattcgatgatcaaagtgaccatcagctatataatgtaattcttcaataacatgccgcagttgcatttgacgatatctcctaatcaatcgccagtaaacaacaatggcatcgcccactaacataacaccaacaaaaagtcgttgccaagaccataaatgcatcccgttagcaaaagtaattgtctttttgagaaagaatataccattttctaaacgtggatcattcaatactgccaaattaagcaaaataataatcgaaagattcaatagcaaaagcagaataacagttataacaccttcgccaaataattcacttttttctttcgtggttaggattactttttgttttttcatccttcctaagcctctactttatagcctactccccaaactgtttggataacttcttctccatcagttgctttttgaatcttatcacgcaagtgagaaacgtgaaccataactgttttagctgaaacaaccgattcttgttgccatactctttcaaaaatttcatctgcactaaatacgcgattaggatgactagcaagcatatataaaattccaaactctaaagcagttaattgaataactttccctgttaaagtcttaacttcatgtgagtccttattaattactaagggtcctacttctaatacatctggcttgtcgtctttgacttctttttgactgcgacggagcaatgatcttactcgcgccattacttctaatgggttaaatggcttaacaacataatcatctgctccagtaatcaatccttgaattttatccatatcgctagtcttagctgaaacaactaaaattggaatttctgaatcttttctaacctctttaataacttcaattcccgacatttgtggcatcataatatcaagaatcatcaatgcaatctctggattagtagaaagtttagttaaggcttctttaccactataagcggcaattggttcataaccttcattttttaaatatatacttaataattcaacgatttctttgtcatcatcaacaactaagatcttcatgaggaatgtctccttattctatatttatcacgtaaaaaaactattattaatattttacctgttttacatctatttacctaaattaaaccacgtttttaaagaatcataaaaaatgaaccctagaaaaaatatctagagttcattttctaactaatctaattcttttttaccagtatacaactcgtaataatagcctttttgcttcaaaagttcttcgtgattaccacgttcaataatatgaccatgatccagaactaaaatgaggtctgagttaacaatggttgataaacggtgggcgatcacaaaactagttctaccagcaagcaagttatccatccctgcttgaaccattcgttcagtcctagtatcaatacttgatgttgcttcatctaagatcatcaccggttcatcagcaatcatggctctagcaatacttaataactgcatttgaccttgtgacaaatcgccaccatctccatcaattacagtctcatatccatcatctagctcatgaataaattcatcagcatgtgctaaacgagcagcttgataaacctcgtcatcactcgcatctggttttccaaatcgaatattgtccatgatcgtaccagtaaagaggtgcgtttcttgtaaaacaatcgataaagaatggcgtaaatcattttttctaatttgagaaattggaacgccatcatacgtaatctttccagactgaatctcatagaaacgattaatagtcgtcttaccagcaccagtttcaccgactaaggcaactttcatacccggtttagcatcaatattaatatcgtgcaaaatttgcttttcaggaacatatgaaaagttcacatgatcaaaaacaatatgtcctttaattggaacttttttaatatcaccattcttctcaggaacatcccaataccaactatttttaacgtcgggattggccgacataataacgtcgccattatcaacttccgaaggttcatcttctaactcaaaaattctctgcgcaccagctaaagccaaaacgattgaattcaattgctgtgaaatctgagcaatcggcatactaaattgccgcgataattgtaagaaagaagcaattgcacctaaagtcaatggtgcccagccgttaattgcggcagctcctccgataaaggcaattaatacatacaataaatttcccatattacccataattgggaacaaaacggtcgcataagtattagcctttccagatgctccacgcagttcttcattaaatttatcaaagccctcttcagcttcaggttcatgtgaaaagaccttaatgacttttaaaccattaagcatttcttcgtcataaccgttaatttgacctaatttattttgttgaaccttgaagtagtagctagacttcacagttaaaaatctaacaattccaaatgatagaccaaaaataataaaagagaataaagtcaattgccagcttaaactgaacattgccacaataacaaaaatcaaacttagagctgaattcaaaaattgtggtagcgattgtgagatcatctgcattaaggtgtcgatatcattagtatagcgactcatgatatcaccataattattttgatcaaagtaagcaatcggtagagattccatgtgggtaaatgtctcattacgaacccggaattgaactttttgagctaacactcccattaacatgctaaaaagatagttagaaataaagccaattgcataaattccaaacattactaaaattgcattcagtaatgtaccatagttaggaaccttttcatgcagtaagggagtaacatatgtatcaattaatcgctcaatgaataaggatccaattaccgctgatccagctgccaaaatgatagtaattactgaaacgattaacatccaaggactagtagttaagactacttttagcagacgacctaaaactttaagacgatttcctttagtttgttgttttgcttgatccataaagttctctcacctactttcctgcattattttcttcttggaacttagcgattgagtgataaagctcattagtcttcattagctcctcatgagttccaattgcttgaatggtaccatgattcataacaataatccgatcagcgtctttaattgaaacaactctttgcgaaataataatcttagtcgttgttggcatatctttagccaaagattcacgaatttcacgttcagttgttgtatcaactgcggaagttgaatcatctagaattagaatttccggattctttaacaatgcacgtgcaatcgtaattctttgtttttgaccaccagaaacattatttccgcctgttcaatcatagtattatagccatctggcatttcacgaataaagccatcagcatgtgcaattttagcagcagctacgacttcttcgtgcgttgcattttcatttccccattttaagttttcttcaacagttccactgaacaaaacattcttttgtaaaaccattgcaactttatcacgaagagcctttagttcatatgacttaacattatgtccagccactctaactgcaccagatgttacatcataaagacgcggaatcatggaaactaaagtcgattttgatgaaccagtttcaccaataataccaattgtttcatctggcgagtatttaaagttaacatgatcaaaaacaatatcaccgtttgtcacatctttaagtggtttacgtgggttttcaatcgctgatttttcagttaaaacagctgcaatacgtttaccactagcttctgaaataaccaattgcgtagtaatcatagctaggatgtttaaactaaataaaacagagtttgaatatgaaaacattgaaactaattgtccagtttgcaagcttccaccaacaatttctttagcaccaaaccagcagattgccaaagtcgaaatattaagaactgccattacaactaacgcattaagtgacatgattttctgcgcagttgagaaaagcttatagataaaacctgaagatttctcaaatttctcaatttgagcttcttcttgaacgtaagtctttacctcacgaattccacgaatattttcacgaacatcttgattcattacatcgtatcctttaaaaatacgtggaaagtaaggatatgcacttttaataattaatgccaaaattaaaacaaagattggagcaattaccacaaagattaaagatagtcttggactaattatgactgacataataattgaaaaaattagcatcagcggtgcacgaacagcaattctgattaacatttgataagcgttttgtacattagttacgtctgtagtaagtcgcgttaccaaactagcgctagaaaatttatcaatattgctgaaagaaaaatcttgaatatgataaaacatatcttttcttaaattagctgcaaagccggctgctgcatgtgcagaaacgtaactggcagctgcacctaaagataaggaaattaaagttaatacgaaaaggattaggccccatttattgatgtatcccatatttcctttcataattcccttatcaattaaaataccaaccaagtacgggatcagcatttcaattaaagcttcacctgcaactaggactggggaagtcaatgacaattttttatattgccgaattgacttacgtaacacattaaccatataaaacccccgttcttttaacttaaaaaagataaaaataaatagacgcctcgcgccgtctattcattcctctaacaaacacattatttgctatctttatttatactgtagactactttaattaaatagtcacgctttaacttctgcgatttcttctacgtgctgcaatctcattttcacgtttaatttgtagtggatcgacaacatggtacttttgacggaaccatctccgaccaaagaacgcaatgacagctaacacaatgtaaacccaagggttaagaactgggttaatcactctaaaggcaggaagtgcagtaagattaattactaccatcattataaccactagaatagccccaattaaaatcatcttccagacagatgggcgatgttctttatctctagtcattaagtcactgtagtaagccatcagaataccaaacaaaacagtaacaacaatcattgtaaaaatacctaattgttgttgtacgcctgattgttttggattttggctaaataattgtactaagccaaagaacccagcaaaaattgcaaagtaaagtaaaccattatctactgcatgcatccaaaacttgctttttggtgcttcttttttaggattagcaatttcaattgctttttctcttggagctttttggtacaagctggatgctggaatacctttacgttgtgcaacaataatttctggcaagatttgatcaattgcaggttctacttgatccatagtgtagttttgatcttctgccagaaatttttccaaacgaaagacataatcttgatttttattacttaacttctttcgtaattcttttggcggcatcttcttaatctcttcttcacgagaattttgttcatgtgccttttttaatttctcttgttttacgttacctactgttgagtttttagctgcttcagtattttcactcttgttttgatcttttggatccattcaaaaaactcctaaacattaaatctaaattcaataatatcaccgtcttgaactacgtaatcttttccttcaagacgaagctttcctgcttccttaactttttgcatggtttcaagtttgtctaagtcatcaaatgaaacaacttctgctcgaataaatccacgttcaaagtctgagtgaataacaccagcaacttgtggtgctttcatcccttcatggaaagtccaagcacgagtttcaggaccaccagcagtaaagaaagtacgaagtcctaaaatatgataagcagccttgattaaacgatcaagaccagattcttcaacgccttccatttcaagaaattcttttctttcatcttcatccattgaagcaatttcttcttcagtagcagcactgatgcctaaagcttcagcattttcactttcagcatgctttttgacaatttggtaatacttatcactttcaggatcagccattgagctttcagcaatattagcaacataaataactggtttagaagtaagtaaaaatagcccctttacaatcttttgttcatcttcattaaaatcaattgaacgggcagcctttccttcttcaagaacaggttttaacttgttcaaaacagccatttcagccttagcttctttatcaccttgttgtgcaactttttgaacttttccaattcgacggttaactgcatctaagtccgcaatcgccaattcaagattaattgtgttgatatcttcttcaggatcaactttaccagtaactgaagtgatattgtcatcatcaaaagctcttactacatgaacaattgcatccgtttggcgaatgttttcaaggaatttatttccaagtccttcacctttagatgcgccctttactaaaccagcaatatcagtaaattcaaaagtggtatgaacaatctttttagctggaattaattcttgaatgcgagctagacgactatctggaacttcaaccatccccacatttggttcaatagtagcaaatggatagtttgccatttcagcaccagccttagtaatcgcgttaaacaaagtagatttaccaacatttggcaatccaacaatacctgcagttaatgacattatatttctcctcttaattggttttattcaaagtgtggtacagcaatgttttcctttggaacataatattcttcttttaagttaactggatcatttgctgaatgcagcaccttttttaattttttattgaattctgctcgaggcatcataattaaatgaccgcaccctaagcatttaatgcgaatgtctgcacccatccgcaagatttcccacttgttttcaccacatgcatgtggtttcttcatctgcactacatcgcccaaatgatacatgaaaaatcactcctaattaattatttatctaaatttatccctagtaaatctaaaattcgatttaattcatcagtcgaagcaaaatcaatcgctaaatgaccatttccctttttgctttctgtaatgtttacgctagttccaaatttatcagttaattgagattcgctagctctgataaaagcagactttttaatagccttcttcttaggcttcttttctttttcatttaacttagccactaatgactctaattgacgaacagtaattccgttcttaaccactttcttagctaagtcatcgattccatccttatcttttaagccaagcagtgttcttgcttgccccattgataattctcctctttgaagaagacgtttagtcttttgcggcaaggtaagtaaacgaagatagtttgcaatatacggacgagattttcctaatcttttagaaacttcagcctgcgtcaagcccaaattcttttgcaacatttcataagcttgtgcttcttctagtggtgttaaatcctcacgctgcaaattttctagaactgcaacttccatcatctgtgcttcatcaaacttacgaatgatagctggaattgtttcttttttggctaacttagaagcacgaaaacgacgttctccggcaatgatttcataaccattaactgatttacggattatgattggctgaaaaacaccattttctttaattgattcagacagctcttttagactcttgttatcaaaggtctttcttggttggtagggattaggcctaatttcatctaaaggaatttctgtaatttcttcagtttcttgcacttgtgggctttcatcaaataaggcttctaacccacgtcctaacccacgcttttttggttctttagagtttcttaccatgagctttcaacacctcttttgctaaggaatcatacacttgtgaaccccgagattttggagcatattctgtaattggcttaccataacttggtgcttcagccaatttggtaattctcggaataattgtcttatacacttttttattaaagtaagattgaacttccttaacaacttcagcgcccaaattcgttcttgcatctaacatagttagtagaacgccttctacgcccaagtttttattaaagtgcttttgaactaaacgaatcgtatttaataattggcttagcccttccattgcatagtattcgctttgtactggaattaagatagaatctgaagcagtgaaggcattaattgaaagttgccccaaagatggtggacagtcaatcaagataaagtcatactcatgactaacctcatcaattccttgtttcaatctagtttcacgtgccatcattgatgttaattccatctcagcaccagctaattgaattgtagcaggaactgcatctagatttttagtttcagtatgatgaattgtctcagacaggggaatttcatcaattaaaacattatagatatccttatctacagttgatttttcaatacctaaaccagacgttgcatttccttgaggatcaatatcaacaattaaaaccttataaccatgatttgcaatgctggcacctaaattaattgtcgtcgttgttttaccgacgccacctttttgattagcaaccgaaataatttgaaccatatttacccctttgcttactttttaagcaattcaatagtaatcttgtaggaatctccctttttatcttctttatacttcacagtcattcctgaatcttttgccattttaattgcttttttaatggtattaatttgtactttaaagtcattagctgttcgaacttgaacttttttcttaggtttcttctctttttcaggcttattctcttcaagctcttcttctttggcctgcttctgtgcttcaaggtagccgtcaagatcttttaccatctcttcagtttcttttacagttagaccatttttaataatttcactgacagccgtatcttggtcttcttcatttaaagctaaaagtgcacgaccatgacgttgcgaaatcttcttatcaattaaaaaaccttgtaccttaggagttaattttagcaatctaatcttattagcaatatatgattgggtctttcccatttgctctgctaattcagtctgagttaagttattaactttcatcaattgcacataagcttgcgcttcatcaattggattaaggttctcacgctgcaagttttcaactaatgccaaagaagcggctttctcatcgtccatattctcaacaatagctggaattttagcccacttcagtgattgagctgcacgaaagcgtcgctcacctgcaataatttcgtattcaccttcaggaccatcagctggcttacgtaaaataataggttgaagtagtccttgttctttcaaagtagccgctaattcttcaattgattcatcactaaaagtatggcgtggctgatagcggttaggcataattttatctagttcaatttcttgaacttgcttactttcaggaatctttttttgacgattgccaaataatgaaaatgccataatctaaatcctccaattaaatttaaagtggttttctactcggtgtgccagcctgacgtggatacttctttggcgtagcttttacctttttaacaacaatcaaggtacgttcatcatccgtatcaggaagcatcaattctttcacttctttaacgcttccacctaatacttcaattgcatttttagcgtctgctaactcatcctgtgctttaggtcctttaagggcaactaaatatccatcaaccttagctaaaggtagacaatactcgctcaaaacactcattcttgccactgcacgtccagtaaccaaatcaaatttttctcgtaaatttttattttgtccagcatcctctgcacgactatgaactagagtaactttatctaaacttaaatcacttacaagttcatctaaaaactttaatcgtttacctaaagaatcaacgatggtaatgcttaagtctgggcacaaaattttaattggtaaagatggaaatcctgctccagcacctacatcacataaacttttctcacctttaaataagtctgaaaattctaaaagaggtgtaatgctatcaaagaaatgtttcaagtaaacttcgtttttatcagtaattctagtaagattgacctttttattaaattcaattaatttgttatagtatgtcgcaaactgttctttttgcttactactaagcttaaagccgtaatttgcgagttcttctgcaaaaatttctggattcatttttcacccgtgaaacctagtttcacattcctaatttaccgcaattaaagtcggttaacaatactatcatcatcataaactaacgtatttaattatgtagtattttttaagaatcgtcaaaaaacaactaagtctgaaaaaatatgtatttaaatcaatatctataggctataatgattagcaaaaggggttaaattcatgattgttacgcttattgtgattctttatcttggctaccaaacctacaaaggataccagctgggatttgctcaacgtgttattaatatgatttttggggcaattgtctttgctgctgcaattttaggtcaaaatagcctaggaaattggttctaccaacaattctcaggtaatctagttccaacaactggtaatgttagtctggaattaatcggttaccgtttcttagctttcttcgtaatttggtttatcggaaagatgattctaaaaatattcaaaggctggctccctaaacgagatcgtactaataaagggctaagtaatctgttagacaatgtcctcggggcaattgtttcatttattgcagcttacttcttagtttacgttgccttatctatgtgccaagcttttcaaaatccttggttcatccagcaaacagtcgattcaccaattttacgagtaattatttacaacactccaggtttatctaacggggtctttaagacaatctttggtattagtcgaactgtaggttaatatttcacaaaaaaagattcggaaatttccgaatctttttttatacgccgattctttcaattgaatcatcatcgtacacaaatattgcaccatagcgaccggctttatcatttttccatccaggaatagatccaccagcaaaaaatagtcgtttacattcaatctctgcttgaactgaatccctagtaaataatgtaacccctgccacatgagtctgaactggatatccagtcttagggtcaataatgtggtggtatttttttccattaatttctaaaaagcgttcatatgtcccactagttacagctgagcattcgtgaactgtcgcagttgtaaggttatctccacgcttctttttcggatcttgaacacctaaaatccattcgccacttgccctttttggagaactatttacgaataaaacattgccgcctaaattgataatcccagctcgtacatcgtatgcacgccaaaggtctctaattctatctgcaatatagcctttagcaatacctcctaaatcaagttccatcccttttttagttaggaagacagtctggttagcatcatctaaaacaacatcatcaggattagttaagcccatctttgctttaatctgtgcatcagtaggaacatgtgctcctttaaagccaatatgccagagttttacaactggtccaataagcgcattaaagccaaaattttgcttactttcataaactgctaatttaattaagttatatgtacttgccgaaacttgaacaggatgaagacctgcggcatgattaatatccatcacttcagaatgatcacgatttacagttaagcgatcctcatatcccgcaattaaatcaaagctctgatctaggattttttcgttttgatcgccatagatctgtaaagtaataacagtacctaaaccacgaccaacttttgaaattgaggttgaagcatagttctctatcattttgatgccttctttggctctaaatataattctcttaggctttgaatcaattcatcatcaatcttcaaaacattcttaatatagttatcaagaccattatatttttcatcaattaataaaagagctgtatctaagtattcatttgcaacacttgctaaacttctaacgttggcacgtaaaatcacaccgccgccttcatcgattatcttttgattcatcatagcctgatatcttccgagcattaagtttgaaaatagataatcttgtctgatagtttccatatcaacgcctaaaagatacaaaattaaaactgtagctataccagtacgatcttttccttcagaacaatgaaaaataattgcaccatctttagtgttagcaaaaatattcagcaaacttctaaatgccttttgtgagtattcttggctaacggaagaataatattgatgacacatcgttttaaaaccagcatattgatctttagtataggtcttctttaattgcgctatcttttgatccgtttctgcactttgattgccatgaattggattatcaatatgttctattcccgctggtataacatcaggagtaattttgatttctttaggtgaacgtaaatcaataattttagttaagccataattaagtaaaaaagtttcatcttccttggtcatttgacataatttaccagttctaagaagacggtgcattttaattttacggccatcaaaacctacatagcctcccaaatcacgtgcattaggcacatgctctagtggtaaaacgttgggcctaatcattttgtaatccctacttttctaattttttaaaaacaactttttgtcctggctcaatatgtgaaagcaaactacactcattagcacaaaccttaccaactattcttacttctttatcagctggtaagttacgcttagcaatatggacttcatcgctgtttaagccattactattaatactaatagttccagctggacggtctaaaggcaactcttgagcttcaagttggggcaattctccttcacaatgtagtctaacgatatcttgagcgagatacaaataattatgccactgattttcttcaagaagtgaactttcttcatctattacatgaagtgtaattgcatgttctttagtataacgcgcgaaagacttgatcgtttcgctagttagacgatcacctacaataacattgctgcaagctaagcctttcaagttaagagcagcagctaaggggtaaccacctcgttgagattcaagcgtagtctctccagcaaaaaatggacctctcttaacgccatctcctgaaataaaagctgccgtttctaaattacatttacgtagccattgatttttcttcttaaaccacttttcatccattccagtttctgattgagaataaaaatcaaataaagccctaatatgatcaaagttagctgcttcttcttttaaatgggtaatatcttctggctgcaaataaattgcatttaaagatacccacatagatttagataatttagatacaaaccgcatcaatacttgatcattaattcttaagcctgtaacattgagtgtctttaatttttctacatcagctaaatcatagcctaaataatgtaaatcatcttgcgacacatcagccatgacctttaattctagatccttgcaccaactagttaactgatttaatcgctttaaaattgtctctgctttgtcatttaatccggtcaacgaagtaaatacctcgttaaaaccagcgtttctcattcccagcaaataattatggtcatccgctgttaaatctttatccaagtaaactgaaaaaccgagcatctcaatctctcttttctaagctttgtgaaaatgctttctttcattaaaatgataaactttaatgacaaaaaaagctagatagaaaatatctatctagttctttttcacaatgcaaaaataagactttacttattttttagcttgttcaacaaatttgacaaaattgttgaatgccaagtcaatcgcatggattgtttcttggtctaataaatccccagtatttttatcaaatttatctgcagcatgcccaattaaaacttcatttcctggcaaaacattagcactttgatcaggtgaaagtaaaatttcacgcatttcttcttgtgcccttgaagctccttgaataccataagatgcacccaaaaccataactggcttcattttcatcacatctgcatttccttgagcgtggctaccagtccattccattgcgctcttcaatgaagatggaattccgtggtcatattctggtgtagcaaaaatcacaccatcggcttcacgaattttatttttaaattcttcaaccttgctatctggttgtgcttctttcttgaaacgaggtaggtcagcaatttcatatacttcaatttcagcttgatcttgataacgtttagccataaattgttccaaaaatctgttatatgaaaaatctgcattcgtaccaacaattgctaataatttcatgttctacctccctacttgcagttacctacttcagaatagaaaacgtcgaattcatcaaagaaatggtctaaaaacttaacagttccatctggtaaatcaccattttcatcaaattgttctggagcagttcccatcataaattcatctccattaaacactttagcgctaaaacctggagaagaaagtaccatctttaaatgactttgtccacgagcagaaccttgtggcaaaactgaggtccctacaataaccactggtttatccttaaacggatgctcagctgatgaaagccattctaaagcactctttaaagatgaaggaactgagtgttgttgctctggcgtagagattaagactgcatcagcttcagttactttcttagcaaaactagccacttcagcaggttcttcgactccctctttaaacattggaagatctctaacttctcctaattcaatgtcatatctaccagtaaaatgctttttaataaattttagcaaatcacgattataagaatgatctgcattgctacccacaattgcaaagagcttcatttctacgtcacctttctcttaactgtctttcccttaaattatacgttttaactttataattttgaaagctatattttaattttaacaaaaaaacaccactttcacttgaaagcggtgtttaattaattcataaaattagcctagacgttcttcaagagaagcatcggtgtctgcagcaaataatggattttcttccacattagtaagacggtcatttagcatcgcatcatggatttgcgccttcaaaacgctaaccatttgcgcttgcgtaaagtttgccatcttgttaatgagtaaagttgctaatccagtagcagcaatccagttggcaatgacaatatgcttgagtctttcatcagaatattgttctgcatcaaattgttgcttgaatttttcgattccaagtcccatcaaagtatcaacaatcatttgattgccaaacttaccatctacaaacattgctctaaataaatcaacatgttcttttgcaaagtacaagtatgaaagatctaaatcaatcaatggttcacctgtaaagttctgttgaagagtgttagacttcaattcatcagaaattcttgctagaacttgattacgtaaatcctgcatattttcaaattcaagataaattggttgggttgagcagttaactgcctttgcaatatttcttgcagttaaactttcaattccaccacgaactgctaatttataagcagcatcgagaattctttgcttgtctatttctttttttctagccactttaattacctcacttaattatattgtcaacatcaacacatagagatcatctaaaaataacagaaattgtctaacatctgttattttctccgtgactatattataacaaaaaaatgaaaatgtggagaattttatctcaatttctataatcttttaaataaactcgaatcatcatccccagtaaattgatcataatgggaattgaccatttcaataacttgttgtttatctaggccttcatttgcagcaaatgcaaaaaatgcggctgaaagaatatatcctttttcacgattatccactaaattgtcagaaaattccatattaatggtattatctttgtaatcagttgtaagaataacttttttatcttctggtaattctgccattttaatgccctcacttatttttaagttttatacgttatacaatatagattatattatcatcaatagaaagtgtgaaacctatgacatctcctgttggacgttcttcttgtacatcgattttaattggcaaaaaagccactgttgatggcagtgtaattattggccgtaatgaagatgcaaaagccgcctggccaaagcatcttgcgtttaaccaacatcaaataaagaaaaataacatttttaaatcaaaagataataaatttcaaataacactacctaatgaatgtttttcttattcctctactcctgaatggacagataaatatggtgtattcgaagaggacggaatcaatgaatatcacgttgcaatgagtgctacagaaagtgcttatgctaatgaccgtgtcatggctgttgatcccttcgacgaagaaaaaggcatcctagaggaagcaatgataacggttgttctacctttcattagatctgctcgagaaggagtagaacgcttaggtaaaatcatccaaaaacatggagctgccgaagcagacgggattttattcgcagataaaaatgaagcttggtacatggagattggctctgggcatcactatgttgcccaacgtatcccagatgattcttacgcagttgttgctaatcaattagcaattcaagtaattgattttaatgataaaaagaattttattgcttctcctagaatccaagattttgtttatcaaaacaatctttggccaaaaaacaaaccatttaattttagacttatttttggtacacatgatgattcagacttaacttacaatacgcctcgtgtttggagtgggcaaaaacttctaactccatctgtagagcaaaatcccgaaagttttgacttgccatttattagaaaacccgatcatcctgtgtcaattcaagaagcacaacgtgtcttaagcgaccacttcaatggtacaaaatatgatttaactaattcaaaaaatgaggggcagcctgcttatcgcccaatcgctgtagctactactcaagaatctcatttgttgcaactcagagatgaagatatggttcattggcttgcaatgggaattgctgctcaaagtgtttacattcccttctatcctcaaggcactaaagtacctacgatgtttaaatacggaaaagaagaatttactactaattccgcctattgggtctttaaaatggctagtgtattagttgatcggaattggggtaaatatgcaactgatttagttaatacccaaaaagcaactaatctaactttgaataaattacgagttgaatacgacaaaaaattagctcaagaaaaagataatgctaaaaaaattgatctagtcaatgaagcaaataaaaaactagctgatgttgctattaagaactatcaaaaattaattgcaaaacttatcactgctcaaacggcagattctccattgagatttaggattgatcctaatttgtaatacgttcataaaaaatacgcagacactttattggtgtctgcgtatttttttatttatctaaataatctttaggaattttatctccaaaagatagcaacttttgataccaaaagtaggagtcctttaagtaacgtcgatagcttccatttcctaaatcatccaaatcaacataaatcaagccatatcgcttggacatttgggtagttgatgctgaaatcatatccgtcattccccacatacaatatcccatcaactctatcccatcattttctaaagaaattagcatttgcctaatatgcttacgcaaataatcaattcgataatcatcatgaacttttccactttcagtcaaactatcttttgcgcctaatccattttctacaataaataaaggtttttgatagcggtcatataaattaattaatatgattcttaatcccactggatcaatctgccaactccaatcactagtcggtaaatatttattataaactccctcagttctatttgctttcgtaatttttaagccagtagtatcaaaagcagtacaaatagaagagtaataggaaaatgccacaaagtctgccgtattatctctaattacttttagttctttttccgttatcttcacattaagtttcttgagttttgataataaatttaacggatagttaccacgaatttgaatatcgctaaaattataactttctcgcattacttgtacactttttaggctatttcgaggatcgctattgtaaggataaaccatcgtgctagtaatcatcgagccaaccactagatcagtatagttctcatgaatatattttgtaattaacgcagctgcaacgaattgattatgcattgcttggtatataactttttcaaaatttttatttggaaatctatctttaactaaccccgctgaagaaaacggatgacgtaaaatactatcaatttcgttaataggaatccaatatttcacttttttatgaaaatgatctacaacaattttcgcaaatctcataaaataatctctgacttttggatcataccaagcatcataatttaaaactaaatttaatggcatttcataatgtgacagcgtaataattggctcaatattatatttatgtagctcatcaaataaattgtcataaaattttagacctttttcattaggttcaggatcatcaccatttgaaaaaattctactccatgcaattgaagttctaaaggtattaattccagtagcagcaagtttttttatatcttcagggtatgtatgataaaaatcgaccccgtgtctctttccccagccatcgcttttcttgtctttaatagctttttgaatctcagagctggttatatcatttgcaactttataacctgccttagcttttttaggatcataacgttcacaatcagcaattgaaagtcctttgccatcttcattccaagcaccctctacttgattagctgctgtcgcaacgccccacctaaagtcttgaggaacatgataatatttcatactattttctcctaagctaatacaatgacattgctactcgttgtaacatcttttttctcatcctttttatttacaactggcaatacttctaagaaatctttactattcaacacaatcatcataactgttggatcatagccggcttttttaattttatcaatatcaaaatcaactaattcttgtccagcttttacatggtcccccttttttactaattgtttaaatccatcaccattcatttgaacagtatcaataccaatatgaattaaaacatctgcatcattgtctaaatgtaatccaattgcatgcccagtatcaaaagtagctgtaactaccccatcatcaggtgcgtatattttaccttcactaggaacaattgcaattcctttacccattactccactagcaaaagtttcgtcattaacctcactaagtggttcaacagttccctttacagggctctttaaatcatgcttttcatgagtttgttcaaatttttctttttgcttatttttttctgacttttcgtctacaggatcatcaaatccgattacccaagtagctataaatgtagctacactagcaacaataattacaataatagcttgaatgacaaaattttcagttttagaaacccacattggcaaacttaaaaatgcaggagttacgtaaataaaggctttaatcttcataaaacttgcaacaacaccagcaattgcaccaccaatcattgcaccatacataggtttctttaatggtaagttaacaccaaacaatgctggttctgtaattccgcctaaataagcagtagcacttgatgacaatgctaaactctttaattctttgttcttactcttcataccgacagccaatgaagcagctgcttgagacatatttgaacataatgcgactacacgaataattggatcgaatccttgagtagctactaattgaatactaattggacttaaagctttgtgaataccgattgaaacaagccatggatatgcagctgctaagatcggaatagccacaatacctgcattgtggaatagccacatagaaataaatccaattccttctgaaatcatgttagaaattggcccaattactaggaagattagtggagccgtaattaacattgttaacattggcaccataaaaatcttaaccatgttaggagtatatttcttaacatacttgtaaatgtaagacataatccaaacagaaataatcgcagtaattaaagtagaagagtacttgatcaactgtaccggcatccctaagaactccactggctttttagctgcaaccattgctgtccaaattgggtgctcagttactaagcccataaaagcgcccaaatactgatcagtattgaatactttagcggcagaaaatccaataaaggctggcataaagaaatatccagtatcaaaaattaaattcaaaatttgatatgtctgacttttatctgacagtaggccactaattgttaaaatcaggagtaaaactttacccataccagcaccagcaagtaatggaatagctggcgcaatggatcctgtaataacactgattacagtgtcgaaaatatttttcttttctttaggcgtagacttataattatcgtcattttcaatattaatcattttaaccaaatcgttgtaaacatcttctacggtgcttccaataactaattgatattgtccagccttttttacaacttgcagaacgcccggaattcttgcagcggctgcatcatctgctttactttcgtctttcaaaacaaatcgtaatcttgttgcacagtggacaactgattgaatattatcttctccaccaacagcggctatgatttgtttgttcatcttttcataactcatttttcttctccgtgtacgatcttgttaatatgtatagctaaatacataatttcttcattgtttaattcataattgtatttttccgaaatatactcttttatcttcaaagcacatttataagcttcaatatcactattttttattacatttaaaatttctctacttaagtctccaaagcttgattgatcttttttatacatcattgccttccagaagaacttcaaatgaacggcaaaacgattataatttaaggattgatagtcaatatcaatatgaaaatagtatctaacaatcttagtaattgactttataaaatcaacagatttactaaagtcactgatatcattcccaagctctccactaatgatatgtaccgcaataaaacctgcttcatcttctggaaaattcaaatcaaattgcgcatctaacaactttaaagcccataaaccatatctgtattcttttggatagtaatttttaacttcccaaataaatttattacttaaatacaaaccctttttcgctctttctacacttgtagcaaggtgatctgtcaaagtaatatatacactatcagctaattcgatattctcttcatgtttcaatctatccacaattttttgtgaaatttgaaagaaaataggatctgtttcatgaattgtctctagcaataactttctttgactatcagacaatggcgtaaaaattttatatatcttccgcttatcaaactcatccccaacttttttaccataagcaatacctttaccaagagctataatttcttcatgatcttggttttcactaatcacagcgctattgtttaaaattctagttatcttcatcttgcctcctttaaagcaacaaaaaagcccacttagccctttatcaacagggttaagtgggttttgtgcaaaaagttgctacaatctcactacattcacttttcacatattatgttaccgctttcttgaatatagttcaagatgaattttacccttttttcaaacttaaacgtccatctaacatttcatagattttatcagaatacttattaagccttaaatcatgggtaactaaaataattgccttttctttttgtttagctaggcttttaaataattttcctacttcttcaactttttcactatctaacgaagctgtaggctcatcagctaaaataattgctggatctgcatatagagctcttgcgattgcaactctctgctgctgaccaccagataattctttaggatatttatttattaattgcataattcctaattcatttaataaattatccaatctgtctttactcatattgccattttttttaactttatctactaaaataaattgctctttaacagtcaaatatggcaccaaattataagcttgaagtacaaagcctattttatctaatcttaaggcatcagcttgtttaggcgaataattcgttacatcttttccaccaataaaaacttcaccagaagtaggtttctgaagggctcccgcaatcgttaaaaaagtactcttaccagctccggaaggaccttcaattagaacaacttctccctctttagcttcaaagttcacatctttaagagcgtcgaccttagcatttccttggccgtatgatttactgatattttttaattcaattactgacatatagaacttttccttccttaaacagcctttgaagggtcaactttaagaattgatttaattggaatcaaaccaccgattattcccattaaaatcatcccagcaaaagtcgaaatcataatccatggtgcaaaattaattggcacagtagccggcatcacgctaactgtaatgagcatcagaatatatgctaaaaccgtacctaaaatcaccaaaataagcgattgacttaacgttgcgccaattaaagtcttgcttggaattccttgtgctcttaaaaccgcataatttggcatcttttgcatcgttaaaatatataaaaataccgcaataataattaatgaaattacgaacaagaaaccaatcattaattcaaaagttgaattttgagcagtatagccgggcaacttattaataaaagtttgcttgtcataagatttaacattcttagctttgaaatctaggttctttttagaaataatcccagaagcttcaacatttggggccattggacgtaattttctccaagttgccatcgtaccataagcaattggagcgatattaattttggcattttttaagaaaccaacaattttatacttttgatcacttccatttaaggtaactttatcacccagacgataaccgcgatcccacataatttgatcaacagctatttcattgttatgtctagcttttcgaccagaaacaagttctaaatctttatatatgtattcgtctttctttaaaccgacaaattgagcagaaatcgtctgatgtttcttctctttaaccacaataggtactaagccaacgaagctatcattactggtcttttttaagtctttcaaatctgccttagtaagaagtgactgactcaaacttacattagcattgtcattcaatacaactgattttgtttgccaactgttaactgcctgcgtattttgcgaagctaaaccaactgctagcgatgaaagcataaaaattaaatatgaaattaaaaaaatcatcaaagtaattaagccataacgcaatttttcgtattttatttcttttaaagctaaaaacatttttgcctactttcttttcaataaacataaactttcatgataacgtttaaggatttttgctttattctttttatcaaacaaggctaaatcgattgcttcatgagttaaaaccatcgcagcccaaacttgagagttcaaatttagaaaagcatctttttgcttctcatcttctcctataaaggcttgattttgactaaggtgcaatttaattaaatcaaaataaatactattttctgtctgatcaataaaattaacagtcatcttataaaaaaattctgggtcaaattcttttagccttgttggtggtcccatatggacctctttcattgctaaactatagagataaccatatgcatcttttaaatctccaaaatatttataaaatgctcccctagcaatacctgcatcctttacaatccgcgctacttgagccttagctaaaggataagtactaaattctttcaagagtgcctgtgcaattttttgctttttttcatccgatagatttataaatgtttcactaaccatatcatttcctcttgtgacaccgtgtcatttttaatacagcttaagtttattcttaaagtgacaccgtgtcaatatttatgaataaaaaatctcatgccctctttctgcatgagatcttaattatgctaaaactcgattatagtaaactaaagtaccaaattcttggttaatatccaattctgctagtccacaattttgcatttgatcaaagcacttaatatcaccattagttaaaaagtgagcacaaatcattctacttaccacaccatggcagactactaaaactgtgtcattttcatgcttttggtacaaatcatcaaagaatgaagcaattcttcgtctgaaatcttctcgtttttcaacgtctgaagcatacttataaatattatcggtaattagaccttttttattaaaagcatctggatacttcttccgatattcaaacgaagattttccatcccaagaaccataatttaattcttcaattcgcttatcggttttgattggagttttattacctacaaaaattctggcagtttcttgcgctctttttaaaggactagcataaactgcatcaaattgactaggatcaaaatttttagctgctttttctgcataagcacgcccttctttgcttagatcgggatcaacgcttgatccttgaatcatcccttgcttgttcaattcagtagttccatgacgtaaaattactactctcataaaatcttattacctcttagttccgtaatataaaggctctgtccgattaaatgtcattaaccgtggtcgctcaatatcatctttttcaaaatgaagttcagtaaaactgacatttctgactgtcattacatcttcaatttttagtttaaaccatctagctattaaactcctaattacaaaaccatgacagacaaccataatcgttttgtcattagaatatggttgaatttcagctaaaaattcttcaactcgatcagctacctgctcaaaagtttcgccatttttagcatattttgtatatttgctattgatggttcctaaatcatcaaatgcatctggatattttaccttcaattcttccgcatgttgaccttcccatgaaccgaaatccatttctttaagccgatcatcagtaataatatctttttgaaaatcagttaaaatctgcgccgttcttttagcacgaattaagggactagcatatacttggtcaattttattattatcaattattttacttacttcttctacttgtttcacgccagcttggcttaagttagggttactagtaccgccggagattacatctgaagtattgtgctcactaactccatgtctcactaataacaaatccatatcatcacaatcctttatttactattcaagaaaatattatactaaaaattcattaagctactaaattatctcacatgtcagactataatgaagttaaagaaaaagaaagtaggcatttatatggcaacaattacaattgagcgcgatggcttgaacttagttggaactcgtgaagaaccttttggagaaatctatgacatggcaattatttttcacggtttcactgctaaccgcaatacactccttctaaaagaaattgctgatgaactacgtgacgaaaatattgctagtgtgcgttttgattttaacggtcatggtgattctgatggagaatttgaaaacatgactgttctaaatgaaatcgaagatgctaatgcaattttaaattacgttaaaactgatccacatgtacataatatttatttggtagggcattctcaaggtggtgttgttgcttcaatgcttgccgggctctatccagatattattaaaaaagtagttcttttagctccagctgccaccttaaaaactgatgctctcaaagggagtacgcaaggcgtaaagtataatccggaccatattccagatcgcttaccatttaaagatctaacattaggcggtttttacttacgcgttgcgcaacaattacctatttacgaagtatcagctcactttaccagaccagtctgcttaatacacggtacaaatgacacagttgtctcccccgatgcctcaaaaaaatacgatcaagtctatgaaaatagtactcttcacttagttgaaggtgcagaccatagctttactgatacttatcaaagaactgcagctgatctaactgcagaatttttacaagatagtaatactttttaattataagcaaaaagagaaatcgacaccgatttctcttttttatgcttcaatagtctttttgaactgatcaccagctaattggcggtagtaatttgccttagttgcttgataataaggagtaagccagagccaacctaagcctaacggaatagtagctaaaattgcccaaccaataaaacttaaatctaataagaataactcacccttatgaccatccattaatttgcggctttcactaattgcttcagttggtgcaatatcttcgccggcttcagccagatccttaacaatgtatggtgccattgaataagaatatcctttaacaattcctgggataattaaaagaattgtccacaaagaaataaaaatattaacgagcaaagatgttaataacgttggcaaaaacttacgactagtaaatccagaaaacatagcgctaaaaatattttcaatctttttaccatctgctaaggttaaaaacgtataggtaacaccatataaaaccattccgcctagaattccaacgctaaaggaactagtcaaactagccataattgcgccaacccaacataaaccaactgcccagaaccaattaccacgtaattgttctttcgcatttgattttaactcagatcttttcatttttattctccccaaaattaaatataagaagatttagcatttatccatattaattacaagtgttttttaaagacgtaggtttctttggaagaatctgctgcagaaaatagataaccaaaatcagaaaattttttcaaatcttctggatcattaatttgttctttagccataaaacgcaccatttctccacgcgccattttcgcatgagtagcactttgacgccattttccatttttattctctaaaaacttaattgtgatcattttttgaccatcttttaaatacgaagaaatcaaacgtgaatactctaaagatgctaaattaataacagtttctgcattattaaatagttcttgataaggtaagtctccccaaaaatgatacaaactatagtctttaaatcctgtcatttgcgtttttaattctaagcgataggaaattacaccatcaaatggtctcaaaataccgtagaatcccgataaaatacgtaaatgatcttgaagataatctaatccttcttgcggtaaaacatctccagccaaatattgatattgaatccctgaaaatgccaaaatcgctggagtcagatttttatcaagcttactggtcaaaagattcctttgatttgctcggacaatattattatttgctctccacaaattttgtaactgctcgaaatctctagtcttcaaaaaatctaacaattcttgcgtcttgtttaaaaaagcaggcttagatctaactaaaaaagtgtcttgatcaactttcattttcttagcaggagcgataattattctcatattatctgacattagcaaccacgataaataaaataattaaactaataactgctaaaatagcagaaataattaattccacttttctctttttcttatcttgcggattagctgcaatgtacctagcactagctgccacgctaataaacaagaacataatgaacagccataaaaacaacccaataatatttggcaatgcccaataaatttgtaaagaaactaaaactgccaacactaacgtactaataattaagccacgcaaaaaattaacattttcatgcttatgataatgaagtactgtttgatagccaaaatatacgataaaaccaattgtaatatataaaataatgttgaaaataaccattttttatcccttctatagtcatcttaattatacgtgaaactattttgctttgcttaaaatttcttttccacttataatcaatcttgaatacgacatagaaagcgaataataaaatgtgtgaaaaagaagatttaaatattgggcttgttttgcaatatcaagttgctcctaaaggtacgattaatgccgatgctctggtacgccatgcacgcgacttcggttttagaggagtaagtattaaagatggcgacgactcacaagtggctgctttacaagatgcttgtcaaaaatatgcaataaagttttgtcaaaaacgtccagcagaaaaattaatctctcctgacgtattagctaaattaattgctgctcgtctagatgacatgaatatctattttgaagttaaattaaaccaagatggatcaattaataacaaatcagagccagcaattgaaactttgcgtaagtggattgatcgcttcggtcatgcatattatgaaagccgtgctgaccacgaaattaaagcagatgaagataatgtgcacgtcttctacaatgcgattgccaaatatcaacgctatatttttattcatattccacttgaagatagcattgaattaaagcacgttcctcatgttgaagaagcagcttggattgatactcgaaacgaagtagaatttgatcaagatggtgaccatttgcatttaaagctgaatcgtaaagcagatagtgaaaaattttctgtctatggcttacgtctccagctccaccgtccagaagatgatttaggtaaaactgaatattaaaaaataaagaagatatcacgagccaattttgccaagatatcttctttattttctttatctattaattgaacgtgccattcgagaaatcgtatggttcatccctctaatcgtcttacttaattcaaaaatagtctcagtaggcgaaactactccccaggctgcatcaccaatatgttgcacgtcaacgccgcagattttattttgtaaggcaatatcatgaacagtttgagcaccagaactttcctgactagttccgattgtactcatcactaatcctccatgttcatgaaccatttttactattttgattaattcttcgctagtaaaacctggaactgtgccaacagctggaactaaaatcacgtctgctcctgcatctagaaaagctttaactgattcttcattagcaactggttcatctactccagctccatgcatttttccggcaataatcaatcctgaaaagttttccttagctgtttttacagctttagcaatcattttattagttacgcctgtaccaggatttccagtaaagcaaacaaagttaaatccaagcttttcggcagcttttattgagtcagctgttgcagtcctacctaacgaaatttgtaattttgtcgattccatctttgcactattatcgacaggctctagatttactccaattggtcgacctgttagtttttgaagtttcttaactgtatcttctggcttgtccactgttaatccacttactttagggttcaaggtatcgaataaattcaataagattaaatcagccccaaaagcagccgcaatttctgaagtcgtcaagccatcaattgccggctcaataactacattttcacttagtacagttctaccttcactagctttgatgctttgttttaattctgcaccattcatctttaaaatttcactggcatttgcacttataattctagtaaccatttctctagcctcttacttttttcaaccaattgacgtttattgaatgcttccataaattggaagtaaatcaaaatattggcgtagcaataactggtatatacccatactatcatgaagcgctttcgtcaggcaatatcaaaataaagtttaacagcttattcgcataactccgattatcttcaaaatctttaatagtttcatttaattcagcaagttgatcggtaataattccattcacattgtcatacatcatcttcatcatcatatttggggtattaaccgtccaagcataaacaggcttattctgcaattgcgcttgccaaataaagtcattatttaaagttgagtattccatagagtatccattggccacgctttgaggataggtgaaattatatggctgaatatataaaacaaataacttaggattaatctgatgcaaaccttcaatcactctatagtctaacgattgaacttgatattttcgtttaataattaattttccatattttttattaaaattctgaagcatcttaggcgaatcatttggcgttgtcttaacttcaatcaacaatttttgttttattttagcagcggcttttaaatactgatcaaaactagcaattttggcctgatgtccatcttcatgaagcgtaattctagttagttgctttaaagttagatcttttggcgttttattaattccagctaattgttttaaattttcgtcatgcataactacaaattgcttatcttttgtttcatgtaagtcaatttctacataatctggatgaagcttggccgtctttttcaaagctggaatagtattttgtacgccatttttattacttactccgcggtgtgaaatggtaagcggacgctgcatatcgatttcttttaaatataaaacattgtttgcaccagcagcaagtgcaaaaactagcattaaacataaagctagcatttttagttttattgtttttttaactttactttgaagcttaaaactctttaatggcgccaccacaattaaaagtgaaacaacgctaatccaaattgcaactaactcactgactaattgaaccagtaaaagattaaatacagcaaagttaaaactgatatttctcggcaaatgatctaagcctaattggcaaagataaattaacagattaaaaatcaataaaattatacttacactaagccctaatactaacaggcgactcaggatcttccaccaatacttatgactcgttaatttccaactttccttcatagcaagaaaagtcttttttctttgatagatcataattggaagcgtcaaaataagacgaatacccaaaatgaaagccaacaagtaaaagattattaatccactagcaagccaaatattccgtgtcataaaatctaaaataaattctggaatttgaaccttagctagtaatggtgttcgataaactagatcagcaaacggaacaattaacaagaaatacactgctagtagcaaaaccgaactaattcgaactgatcgatatgattgccatagttctttaaataaggccctcaatgaaaatcttccctgagaaatttctctaattcctaataatatcagtgaaaattcaccataaattactagaagtaaaacaatcaattcaagaattaaacagagaaacatcaaagtgtgtgtactgataatcgtaataatattttgatatgaaataaacggaattgcgctagcttttaaaatagctgtagtaagatacctaaaaagcggaataataagcacctgcgtaaaaagatcaattccaataaataaagctatatattgaagccaatattttctgaaattattagtatacttatttatttcttgaaaaatattcttcaaaaatctatcctccatcgttatgttcttgttgctattgtatcctttagagcataaaaataggaatcctaattctccccggattcctatttttcaatcttagcagtttttacatgtgaaaagatcaacttacttaattcttggaagaataaacgatcttctatatctcttcccttataactacttaatacagtacaaaatactggtgctttcttagtcataaacgcacaaacttcatgacgcgcccgcctatctcgacccaatttattgtaggtaagaatattatcaccataaaaagttaaatcagttggaatagtatgattgcttaaggcgttacgaatcaatgcacagaatggattttgagtggtcatcaaatgagtaattagtttatcaacactagtggctgtacattcattatcttgcccactagctgaataacgcattaattctcttcctaatcttaaaccaggatagtttttctttagccactcatcaatttcataaatatcaaatttttcaattaataaattagtagccacattatctgttatcgcactagttaagtaaactaaatctcgaacactccaattagtgcgacgcagatccccaataattccggcacctcgtacccgtgatagatcagtgacttccatttcttcattcacaatttcaggattgtttttccactggtcctcaatatatgcagcaatcgcaaggtcaatcaaacttcctgctgggaaaaccttctcagcttgatgttgatacattacttggtcgccatatttaacaattacacttgtatcgagatcatactgttggatgatttcagtaattccatcctttaacataaagctatcgccttccttatagaattagacaaaacttaacttacgttatcttatatattatgtcagtagttttatttataaaatcattttaaaactttttattatcctgccgcaagatagctgcaaatattcaaagaaaaaagctgcttaaagcagctctttattagctatttacaataattatttaatataataatggaataccgtattattcattcaattgttttaattggttagttattaattccgtttctctaaatctttcttctaatcttggtaattcctggttaattgttgctaaaaataaaacacttgaaacaaacatctcagaaaaaagtgaattaatagcccctactctgagtagcttttcatcagttgatacacctaatacaacatctgtgagctcgactaaaggagactgacgtgaacgtgtaacgacaataattggagtatgatttttacgagcttgatccgccattaacaatatttcctgcgttaatccactataagaaaagattactaaagcatccgtagaatgcgaatagcaaattcgctctaaggcaatatgaatatcctgattaaaaaccacattcttatcactacgaataaatttataataaagatcttgggctggtaaacttgaagcccctactccagctaaataaattcgatcagcattctttaaaaaattgatcgcttgattcaaggcaagcccatcaattaaatgagccgtctgctctgtatttttctcaatacttgataaaagtttctgtaatacaatatgtggattatcatgatgatccacaattggatcaatagtttcttcgttgtcctgcggcgtatcttgagctaattgaatttgaaaatccttaagccctttaaaaccaagttgctgacaaaacctaatcattgaagcagcgctggttttagtcatccttcctagtccttgggcatcttcttgtaaaaatgttttaggatgggccagtaaataatcagcaatcttcttagatgcccctttaaagttaggataattatttaaaacttttgttgataaatccatagtgtacctctttttctaatacaacattttaaggtactgaaatattatttcaagacttttgcacaaagtttaatagcctattggcttctcttcttaatgtctgattatcattacattcagataatttataacctacaaaatatggtggggcataaaatcgtggaatgatcttgcaacagattccgtcttcattgggatagaagaatagattataagaatcgcatcgaccgccatacatttcttctaaaatatatcgcacgccgttttgaatccaatctgcccaaaagtttaagccactgttttttaataaattgatatttatttcctgaaatccttgtatagggtgagttgcaaaattaacatccatattatttgtttcaaagaccttaattccagtaaaattattggcatgaatatacttatagccgtcttctttatctaatcctacaatttgcatatgtggatgcgataaggatccattagacttgggaccaaaatttttataccaaaggactgactcaaatttgccactttgccgcattttattgaaacacttcaaggcaaatttcatcaattctcggttatattcttttgaataattgcttacatccccatcatggtcatcagattcaatcagtactgtctgttttgtatctttcaatgttgggaatcggttagctagccaaatcattggtccatttattcgatagatatcggttaagttatcaacattgcaaaaagggcaagtattatctctttcagcattaaaactggacgacttatctttagctattgcaaattcaaatataagtggatcgttattcaagtttttgcccctctccctaaaaaacattgtcaataacttaggataatgtcctaaaatttgttaattattagcggagaatttttctccgctttttatgtatattgatgatatttgtgagcttttgcttgttgccttaaaaatgactcacgtttccacggatgtgacattggcggaatatattttcttccagctcttttctttttaggctcttgatctatttctggagatatttttgcatttttaggaatctctttgagtaaataaacatgatcatctactgtagctaatagctgtccatttagagcttcaattaccaagcatttggtgcctttcatgaaacaaattaacttgccgtattcatctacagcttgatagagcttattcttaaaagaaatagctgagccactatcaaatactctgccactaagaacagcaagcgtgtaattgattttgcgttcactaggagcaacttcaaaaatagaccaccctttgcgagttttattgccaaacttcttgttaaaattagggacaaactgttctatcagatacttgtttgcttcttcaattgtctttacacttgctaatcttaactcaggtttaagacggctttgaacagtttgattagctctttcaaccatgcctttagcctgtgaaatactagtagttttaagatcaacgcctaaagttttgcaagcatagccaaactgtgtgaggacatctttatgagcagatttagtcttagcagtttcgtagttgaatacagtgcggttatctgttttaaaacagagtgggataccataattttgaagaatttgtttgaagacatgataatagccgtttaaggtttcttgccagtcaaaataagcaccaacaataatgccagtagcgttatcaattgctagatgcaggtaggctctttgagtaccaaaccaaactaagactgaggcatccatttgaatttcttcgccaaaatatttacagcgttcatgacgaggatgagcgtctgccacagccagctgatgattgactgcaacttcaacttcaacttcttcttttgtttgcttagggtgttgggtacgccatctttttttcgctaaagcacgcttagtctttttccatggcttaggagatagaatatcttgctttttaaggagagtatagaccttagtgtaagagacgtgaatatcttctaaattttctagtagctcaacaaaatgtttcagattgcaatcttgatatttagagcgatataaggttacaatttgattgttaatttctgtggtgagacaattaacaggtttgcggtctttgttcccatgaacgaaggccgcttttcctttatcttgatattgtttaattcttctatttacttgtctaacagaaatacctagctttttagcagccctatgtttgttcccattatgatcaataagatctttaatgactttatactgttcttcatatttcatagttaaataaatcctcttcatttaatccataacctccaataaaagagattatgacatagttaatatcttattaggacattttcctaagttaacagttaagacattatcacttgttaatcacagtttttgcccctctccctaaaaaacatttgcacttcagtctctactctactataataatctatgaaggcgattaaagcgctttcatataacattttgtagctttccttaactttactctttcggtcacttttccgaaagagttttttgtttgcttaagaaagtacaactcctagctccttagccttagcatcttgaatcaaacctgctattcgatcagaaacatgatcatgctcgatatcaattgcatttcctagtttaaaatcaatagcaatttttactaaatttagatatgcatcttcactatccagttcagtttttccgccgaattttttactgcggaaagtaattaaaatcggcgttttatccataatcgccttaaccttatcggctacttccagcagtctgttcattaagactacatccttaaaataatcaattctccattccatcatttcgggctggagtttttttatttcttgcgcctgttttattacatcctcctcacttaatcctttattaactaatgtcaaaaaggtttgatcattcactgctacttttttcttctcaaaactcatcttttttctccaaataaaaaattgctacctaaattatagtagcaattttattttcattcattaaaaattatctcgtttaatactacggataattgcaattacaaataccaaaatactacatcccattccaaagtaggccatataaccaacactaaacatttgtccaatttgagccgtattaatttggtgattaatcgcaaattgattagcccattgatgaattaaagttggagtcaaaatgaacaaaactgttgaaataccagatccaaccagcatggcacgacgtgaatagggttctctaaagaattgagctaaaacacaaattgcaggtgcgaccattaaaagaaaggtccaaatcataatccatctacctgcagagtcattcataaattgaccactatttgcagcataacgatatgttccccataaactgccacccaataagttatcaagtaacccaactgcatttgctccttgagcagcataaacattattggtactagcagctgcgccttgcaacatttttagcatatcttgcgagccggtagtttgaaaattaatagttacaacttgccgcatataagtagataaaaacataatcatcgatgctcccagctgcagtgccttgagtaaatgaagcgtcttatttccacctaatttgaactctaaactaagagtacggtcaggatttttacttttgacaataataaatacacctgcaattgccacaacgattaaaattgcaagaccaagccaccacttagtcataataaagataattgccaagacgattaaagttactgaaacatacggacgatttaagaataagtcccaaacatttaccttaccgtgacttgccaaacgttgacgatattcttctcttgttaagacattttgattttttttatctttagaatcttgtattttgctcattactctcaacctttaccttattgtgctaatcaatattagcatgttacaccatgttccgcattaactttttaagaaaattaaccaacttaagcagatcgtgacatttgtctttaaggcactatgctataatattactattgaaaagtaagaagtaagttcaggattgggatgactatgtgagcaaatcacacgcttataatttgccaaatggatggcataaaacattctatacactttggctaggctgttttattactggtttagggtactcaatgacgatgccctttatttccttatttatggctgaactgggtcactataataaactacaattgaatttatattctggtctagcttttgccatgacttttattgcccaagccattatttcaccttattggggaaacttagctgaccgcaaaggtagaaaattaatgtgcatgcgtgctgctggcgttatgagcttaaccatatttattactggtcttgctcaaagtgctttctttattatttgtatgcgattcttacagggactattttctggctatatcaacaatgccactgctttaatggcaagtgaaacgccgcatcaacgtagtggttgggtaatgagccaaatgatgactgcgggaacggctggtaatttagttggcccactaattggtggagctttgtctagtgccttaggttacaggattcctttctttattactggcggactaatgtttttaacatttttaggaacgtggttattagtaaaagaagacttcaccccagtttctcgtgaaaagatgaagccaatgggagaaataatgcatggtttacctaatgttaagttaatcatcattatgtttgtaaccacgatgattgttcagtcatcaactatgtcaattgatcccatcgtttctttgtacgtaaaatctttaatgccccacagtaacaatattgccttgattgccggtattgttgcagctacaccagggcttggtacaatgctttcggcttctcatattggtcatttaatggatcatatcggagctgagaaagttctgcgttggggattactgattgcaacaatcttgtttatcccgatgactttcattcctaatgcctggtcactagctttctggcgatttcttttaggtattgttagtgctggattacttcctgctgctcaaacagttctaactttaaatgttccgccagaagcatttggtagagtattctcttataatcaatctttccaagccgtcggggctgtcttagggtctttactcggttcaacaatttctggtatgtttacttatgaatgggtatttgcagcaactggaattacgctattgattaattatttaatcatgcaactttccgctcaccatcaaaatgcctaacttgttaaaggagtaattgtaatgaaaactattggtattactgcaagcatcaaaaacaatcaattagtcgttgatcgtagcattattgatactgttgtaaagctaggttatcttccgcttgtttttgctccagtgagtttaaaaacactgccattacctaacgttaattttgatgctttaattcttagcgatggtcctgatattacaccaattttttataatgaagagccacttcccgaactcagagaaacggatccacaccgagatcagtttgaattaaatttgattaaaaatacccatgattcaaacctcccaattttaggaattgggcgcgggatgcaaatgttaaacgtagcctttaacggaacgattttccaagatatttatgttcaaaattctggagcaggtattcagcatatccaaaagaatgatttatctttagaaagtcatcatgtcaatgtaactgaagaaagcgaacttgctaaggctgttggtacacatccttacgtgaacagtaatcaccatcaagcaattaagacaattgctaataactttaatattgtagcaactgcgcctgatggcattattgaagccattgaatcaactgaccaaacaatgctaggaattcaatggcggcctgataaattattagatgatccaaagcaagaaaagatctttactaacttttttgataaattgcaataataaaataagagctagagaaaaacatgattctctagctcttattttatttactaatcttttttaccctcacataaattcaaccgaactatcttattaaacattgccttttcttcaggtgaaatcttatgagcaacttcaattattgctacatgaggattttttaataacgtttcatggattgcaaaagataaattaggatctagtgcacttgttgcttcatctgctaataaaattggccggcctgataagagtgcccgcgcaatttcaattcgttgaatttgaccaccagacaagccgtttccggcttcgccaactttatgatctagtccttctttttttactaattcagctaatcctgctaaatgaataaccttctttagcttctcatcactaacttttctacctaaagtaatattaaagcgtaaggtatcatcgaacatgaatggtttctggttaacgtaagaaaagtaattatgagccttagcccaatccccagttacattttctccattgattaaaattttaccttctactgggcgctttaaccctaacattaatcgtaataaagtagtctttccccaaccacttggagccataagtaagattttttcaccaggctttacctgtaaattaacatcagtaaaaatcgtatgcttatcagatttagtttgataagcaagatgttcaacagctagtccttcaaacttctctggcttttctgagttttcaattgcttcatagttaagagccttttgcgtcttcttccacattggcacagtagatttaacttgattaaattcattaaataaagttacaacaggcgtaatgaagttcattgctaagtcaaccatcataaatagtgtacccacgcttaggcttccctgcatcatcatgatgccaccaattgtacatggaataataaagcagaataattctgcagcagaataaattaactctagtgcccaagcttgcgttaagttcatattacgcaaggcattttccatattttgagctgaatgcgttgctctcactacaatgttatttctaacattatatagcttagctgactgggcaccatttaaagaatcagaaacattttgcgtatagcttgcattggttttggcccaaatttttgactttttagtaataattttactagtaaaaatttgcacaactgctggagctgccattgctaccacaaaaataatcgtcatttgccatgaattatacaaggcaaaagctaatgagccaatgaaagttaagccttgataaatcatatcaagttgcgctgtaattcgattagtttcaatttgctttagatcgttagtcatgagcgacaagccatttttaatatccggctcgccttgatcaactaaatactgcaaattagctcgcttaaagaccatgttaacatcacgaattatgcccatttttacacgttcatagacaaaattactcatcataaagcagagctgccccaaggcagtcaaagctgctaaccgcactaaatgcattacatctttagaatgcgatgatgctacatttagcataattttaatcatataagctacaaataaaatattacaggcctttaccgcagccaaaatagtgaaccaaatcacctgacttcgtcttgcatattttaaactcatctaaaactcctcactttagttagacgttagtttattatatatggctttattttctgaatcaaatacacaaaaatagaccttaatattaaaattttgttgttttaaccaattcctagtagtttcaactgcaatttttgcagcatctacttttgtgtaaccatagacaccggttgaaatacatgaaaaagcgattgaatgtaaatcatattctttagctaaatcaaggctatttttgtaacaagatgccaataattcagcattttgttgagcaaaattaggattgtacacaggtccaaccgtgtggataacatatttagcaggtaatttataacccttagtaattttagcttctccggtatcacagccatgaagagttctacattctgctagtaattctggaccagcaacccgatggattgcaccatctactccaccgccacctaaaagtgttctattagctgcattaacgattgcatcaacttttaattttgtgatatccgcttgaattacttgaagatcattcactaactctcaccctttctaatatttcatatttatattctatctcaaacacaaaaataagctcatccccaaagcaggaaatgagcttattttgatttatgttcatgagtatatattatgggaaaatgcatgtaagattgagaagagactaattattagaaatttactaatcaaaacttatccttgtgaaatataaaaatataccaaaacatatacataagaaaaataattgatactattccaaatgttacagccattagatcatttatatttttaataataagtataacaatcggacctatacaacaaaataaatagcttatttctaatatgagtttattaacattcattttgaaactgtcaaattttttgtgtaaatagatctttctcgtaaattgtttttttaacgttttatttattcaaaataggattctaaggtatcctggacttgaccaaagcctttgtgaattcggttgaagtagcggtcattgtagctcattgcttggatgccaataaaagtatcaagcgactgttcagtcgggaactccgctttaggcttagccttgcgcttaatgacgttattaaaggattcgatcatgttggtagagtaaattgaagccctgatctgcttaggataattataaaaaacaagcaggtctggctcgatgtctttcaggtttctaatgacacgattgtagctcttgttccatttggcataaaaagcatgcaatacatcaacagcagccgctttattggcttgctggtgaatctgcttgaattcgttcatgattgcctcgcgatcgtccacgcgtactttagcgcagatgttgcgcataacatggaccaagcagcgttggaaatgagcttgaggataggtctttgccagtgctgctttcatgccgacaacgccatctgaaaggaaaagctctacttgctttaaaccacgagatttcatgttctggagcaacgccgtccagacttcaatattctcactaggcgcaatgcagtagtcgataacttccttgtgaccattaggcttgatgccaatggcaatatatactgcttctcgttcaaaagtttctcgacgcaacggtatatacgttgtatcaagataaacacaaaagaacttatcgctcagcttacgcttgtgataagcctcaactttaggaatcatttgcttagagatattagacacttgagctggactataatgactgccatacattttttcgatcaaattagctatttctctagtggttacacctttagaataaagctttataaccatatcttctaagagatcagtatgttgtttatagtctggcagagtgtgttgatgaaacataccattgcgatctcgtggcacttgtacctcaattgatccaaactgggtatcaattttacggaaatacgcaccatttctagaattaccagtattccagccatttctagcatagggatcatatcctaaaaaggcagtcagttcagattctaacatgtcattaacagcttgttggatttcatgacgaagcaaatcattaattttatcttgattgaatagagcttgagttatatttttggtaaaatcattcatgaaggagttcttctttctgtatgttttttttgttcaaaccaatcatacgagaaaggaactcctttttctaatgttttaggaaattaaattaaggaataattcatccttacacaaactattttacggtctcttcatttttatttgttccactaatagataaaatattattaatttctaggctttgaatacatgtatataatacaaaactgttaaaattccatcagcgaagtgtctatcatgacacaattaaaatgctatataggctgtaatcgactccatcccatgtctttcaaaaaagtctaaaatcttttttgcttctaatttttcttcattaaaaagatagccataataatctgccattactttaaaaaatatagttcttggctcaaccggtaacttatacaagaaattcctcaatttatttatcatctcaaaatttctatcatgttttaagaacattatgtttaaataattaaccattattcctccaagtatttcttgaatttttctgctggctttatctatttccttatactttcttaaaatcatatttagttcatactcaatctctgattcatcaaacagagatatagccatagcaaacaagcgcaagttatcttctccccattcatctatgttaagtattagtttcttaatcatcgcttcttctttgcatgataatttattctttttaaaaaagctttctagaagaagagcatgagcatacgcatttctatattgataatcttcagcacaaatttttcttatttctacaatttttgaaagattttgttcataatatgcatttcttaactgctctaaatactttttacttttctccttactttctatacctttaaagaaatcggaaatattaactttatttcgttcaagtatttcaattagatcttttgcgttaatttcatgtaatcctcgttcaatttttgaatagtatgattttgtcaaaatgtctcctaccatctctgtttggcttagtcctaattctaatcgtagttttttcaattctttcccaatctgcattatttccatctcttttctaagttaatgatatgtaattatataattccagttctaaatttagaacaaaaaataagctcatccccaaagcaggaaatgagcttattttgctttaattatcaatgattatctcttagtaactgcgattaaatcgtcgccatgtttcttgtctacgccatcaatacgttgaacatttgcatagctagctgtgttagtaataacagtcataacagttgtgtcatatcctgctttcttcacagcatctaaatcaacagttcctaatttttcacctttttcaacatgttggccctgtgttacatcgctagtaaagccttcacccttcatgttaacagtgtcaataccaatgtgaattaagacttctgcaccttcgtcagacttaattccataagcatgcttagtttcgtaagcaacggtaatttcaccagtgactggagagtagatagttccttcacttggcaccattgcagcacccttacccattgcttcagttgagaagactggatctttaacatcctttaagctttctgccttacctgaaacaggagcagcgattacttcatcatgtaattctttatcttctttgatgatttgttcagctttttcttgttgtgcaacttggtcacctgctgattcaacagtacctgattcttcaactacgtcttctttgaagtgacgcttaccgtatacaaaagtcaaaacaaaggcaacaatgaaactaattgccactgagagtgcccacattggaatactctttggcaccattgataagaaaccaaggaaaccagctgaaccaagagcagcagcagtaacatgcattaaacctgcaaaggcagcaccaacacctgcaccaattaaagcacagaagaatgggaacttgtacttcaagttaacaccaaacaatgctggctcagtaatacctagtaaggctgaaacaccagatgaacttgctaagcccttaactttttcattcttagttaagaagtaaatcgcaaaagtagcagcaccttgagcaacattagccatacatgcagtaacaaagataaaatcaccagatccacgaccacgtgcatattcagctaaaagttgagtttcaactgctgggaaactttggtgaagaccagtagtaacaatagctgagtaagataaaccaaagatacccataccaaaggcaccagttgtgttgtataaccaaacaattgcagcagtaatggcatctgacacgcctttaaagactggtccaataattgtgaaagttaagaaaccagtaatcatgattgaaagaagtggtgtgaatgtaaagtcaactgcagatggcaaccacttgtggaatctcttttctaagaaagctaataaccaaacagcaactaaaactggaataacttggtattgataattagtttgagatacatgcaaaccaaaaatatcccagaacttacctgctccacctaaagctggagtagtcataatcataccaatagttgcacctaagaattggttagcgccaaaacgcttagctgcagacataccaactaaaataggcataaaaataaatggagcagctgacattacctgaataatttcagataatcctttaacattaggtgccatttgaacaactgacttagctccaaataatcttggagaagtcaaaaagttgttcaatgccattaacaaaccaccagctactaaggctggaataataggaacaaagatgtcagacaaaagcttaataaaagccattactggattaaacttttgatctttttgggcaacttgcttcaaatcatcagttgaaagttcagataggcctgtcatcttgattaattcatcgtagacgttattaacatccccaggcccaataataatttgaaattgaccgttagttttgaaagtccccttgatatctggatcgctatcaagcattttcatatttactttactatcgtcttttaagactaaacgtagacgcgtagcacagtgagcagcggctactaagttgtcgcgaccaacagcttcaatgactgtttcagcaacttttttgtgatccatgtctgtctcctcctcaaaattgtgtaagcgtttttaaatattttacatatattatgatagcgcattctagttttatgtcaagcgcttatcacaaaaatatcagcattttgatactttcttgccattttcaaggtatgttatcaatgaaagtactgctattcgtttgacatacataatatttttagttactatctctatataagaatgcgtttacatattcaatgaggtgaatagttatggaatggacaagagaacaacgttatcgtaaatacaaagattgggatgcacagaccttattagatctccaagctcaagcagcaacttccccgtatcagatgcactatcatatccatccactttcaggattactaaatgatcctaatggtttttcttactataatggcgaatatcatttattctgccagtcatatccttttggtccagttcatggagttaaatcatggattcactttgcttctcctgatctagttcattggcattatttaggacccgcaattgatcccgatagcgacttagacaatgctggagcatattccggctcagcaatggaacataacggaaaacttctattaatgtatacgggtaatcaccgcgatgaagactggactagaattccttatcaagtaattgccgaaatggatgaaaataatcacattactaaacctgataaggcagcaatcttaccaccagatcatgttagcgaacatttccgcgatccacaattatttaaacataatggtaagtattatgttttacttggtgctcaagatgctaaaactaagagcggtcatattgatatttatgaatcagatgatcttgaaacttggcatgaaaatggttatttagacttaggtaaagacgaaatgggctacatgattgaatgccctaacttagttttcgttgacaactatcctgttttaattttttgtcctcaaggtttagataaatcaattgccgactatcaaaatatttatccaaatatgtactggattggcaaagatattaatttaagtaaagcccaatttactccgcttcaagatcatccagctaatttagatgatggctttgatgtatatgccacacaagcctttaatgctccagatggaaatgcttatgccatttcttgggtaggtttacccgactgtacttatccaactgataaagaaaattgggctaattgctacagccaagttaaacgtttagaaattaaagatggcgtgttatatcaacatcctgtagacgcaatcaaaaatttacgtcataatgaaaaacagctcaatgatgaaaaaataattagtcaaaaggccggtaaacaatatgaattaaaacttcacttagctgctggtcaagctggaaaattacatctagcttctaatgaggatttatctgcaagtttagtagttgacttcaatacagctcaagatgctaaattaacgattgatcgtgcttcaggtggtccagctgttaacccagattacggtgcaactagaacaattgaacttaatgccaaccaagacttagatctagatattttcgtagatggctcattatgcgaaattttcatcaatgatggtcgccatgttgcaactttacgattctttgcaccaagctcaaatcaaaaaattgcctttgacaaagataccaagtacacaggacgattatggagcatgaattctatattataggaagatgacaatggttaaattaaccgacgtagctgctaaagcaggctgttctgtaactaccgtttcacgagtaattaacaattatggctatattagtcaaaaaacaagaaaaaaagttcacgaggcaatgagagagctgaactatcaaccaaattctgttgcccgttctcttcagggaaagaaaaccaagcttattggtttaatttttccagatgtatctaatccattttttggtgaattagtttctaaaattgaagatcaattatttaatcatggctacaagacgatcctttgcaatgctggtagtgatacagagaaggaacgtacctatctgcaaatgctcatggctaatcaggtagatgggattattgctggcgctcataatctgggcattgaagaatatcaaagaacgggtttgccaatcgtttcgtttgatcgtaaactctcagataacattccaattgttagtgccgataacttcaagggtggcagtttagctactcaagaactttataatcatggtgcccgtcatatttattttgtaggaaatccaactctagatgggcaccctacgcaaaagagattgcttggctacaaagaaacaatcaaggaattacaattaacggaacatattcatccagtaatttttaatgaaactcttgcactaaaagaaatggcaattaaagacttactggagaatcataaagtagacgggatcgtagcatctgacgaccttactgctcttttgatcatgaatattagtcacgaattaggaattaaaattcctaaagatttaaagattattggattcgatggaagtaaagtagtacgtgattttgagccacgtctgtctacaattgttcaacctattccttcaattgcacaactacttgttaagcttttagaaaagcgaatcgacaatcctactgaaaaattagataactatacatactacttgccagtagaattacttaagcgcgaatctagcggaaactaagaaaaagactttagacatttttagtgtctaaagtctttttgtgtaaattttaaatcattagagtaagtttttatactttctatttctttaaatcaccataactaattaaatcaatatcattatcttcaatccagccctttaaactcttagaagttaatgtttgcagatctctaactctaggtaaagttagtgttgaatgatctaaaatatatgcatctacataaccgggatgaaaatgaagagcagttactaaaccattatccttatcttttaaaatatcataactatcattaaagaaatcatttggtgttgctcctctatttataatctccgcaactttggagttcaatttctcttcaacttgaaaatatttttctggactaggctgaagaaattcacctttatagtagacatcataatgtaggccaaattctttcgctacatccataatagccttatttgattgatcatccattgctgaatgcatttcaatatgagaaggataatatcctaaaaggtatttaaattttttaacttgagcctttatttcagtaaaacaatcttcataaacaaatttctttttatgtgtcttaaaatctttagagccaatatactcaccatttggttttaccaaactaggaattttttcaggatttgatactggacttcccgtagttaaattgacatgcaatccaacataaacccctggtacctcttttaacaacgatatagcatgttcagcagctggttgattaatcatgatagtagtagacgaagctactccatcacgtagtgctttaatagctccttcattaaatccttcagacatacctaaatcgtccgcatttataataacttttttccccatttatatttaacttctttctttagattaaaagataccgattaaagcgcctaaaataccaaatataataataccgaataataagtaaattacttttacacgttttctaatcaaggcaaaaacaattaaagtaacagctaacggtaacaaacccggcataataccattcaaaattttttgaacatttagtgttgcacctttcattgcccattttaatggagtagtgatagttacagagcttgcagtcattgcgccaatcatcatcatacctatgacagtagccaaatcagtaattttcccaatcaagccagatttagaagatttttcaataaatttttcacctgaagtataaccaactttaagtaattgccatcgtgtaataattgatggaatctcgtaaattgctaaaaacaagaatggcgctaaaagatttccttgcatagccagcggaatagcaataccagcagcaattaatcttaatgttccccaaaaaatggaatcacctatacctgatagaggacccattagagaagcttttaaagcattaatagattcaggatcaaagttttcaggattatttgcattttctttctccatagcagcagataatcccataataaaaggcgcagtttcataagtacagttaaagaaactggattctctaacaatagcttgtttcttttcattagaattatttttataaaatctattaattactggaaacatgctaaattcaaatccaaacgcctgcatcttaaccatagtaaatgaactaaaaagcagccatgatctccaaaacatgctctttaacatatgtttatcgtcaggagataaatctgatttctttgtatcaacatttaaaacatttttattctcactcatgataagaagtcctcctcttctttctttttagctgcttgtttatcttctggtttagatacattggaaacagccacattattagtgattgaatgctttgttacatcatacattaagaatgcaatcgcagtagcgaatatagcgacagccaagtttggtaattttaaataaactactagagcaaaaccgacaaaaaaccaaataaagtattttttcttaaacaacatattaagcaacattgcaaaaccaacagcaggaagcattttaccagctgcaataaatccttgagaaacaaatttaggcaaaatagctaaaaatgttttaattgcatttgtaccaagtaaaatggcaaaaaaaatagcaatagtattcaaagcaggagtcataaatcccattccaatgtgccatctagtaattccagcttcattgcctttatgagccaatttatccattctaggaacaaataatgccatataactgtaagtaatttgtaaagtgataatagctagagcagcaacaggaacggctatagccaatgctttagaattagaggctccagttaaaatagcagttgcagtaccaatagttgagccaaccaaggcatcagctggaatagcaccgccaacagcaattactcccaaaaataccgattcaaagacgccacctaaaataatacccgtttgtagatcacctaaaagcaagcctatgatgggtcccacgataataggacgattaaattgccataaaccgatactttggttaatgtaataaattaaatagtaagctatagctacaattaacgcttttgcaaacattatttacacctctctaaccataaatctttttaaagtttttctttgaagaatcaggagtcaattgtgaatcaaatggtacatttaattcagcaatttctttgatatatttcatatcgtcatcatctacttcaacagtggcatcaattttcttttgtggctttcccttatgcttattaactggtaataagccatagttaccgacattaacttgttcaatattctttacattcttagcaatttctaatgcatctttgaaatttctaacaactaccatcattgaaagattttctgctttaggattattaagaatattgatcgtatcttttacatcccgagcaatgaatttaatgttatctggaactgccattttcatcgaagtaatttgtaattcattatttacaacatcatcatttgcaacaataatatgagtaatacttaaagcttttgaccaaacaacagcaacttgtccgtgaattaaacgttcatcaattcttagcattttaatcatttttcaaattctcccatttctattaactcaaaaaatcctcatcgctaagactatcttgttttttaggtagcttagaaatttgcacaggacatttattaataatctcgtttaaatgtttttcactcatttccccaccatctaacacaacagaaagaacagttggtaaattaacagatgtaattacaaaaacgttcttagtagtattggctattttcaacatcacttccctattaacacttccaccaattaaatcagtgaaaataattccaatatctttctcttctaagctatctaagaatttattcaatggaacatcaatatttgttttattttccgaaccatctaaatatgcatctatagtcgaaatattagttttcccagttaaaatttttattgagctttttaaaccagatgcaaatttcccatgacttgcaatcaaaaattttctcatttctatcttccttctgaattgaaatattttatttatctcttcacctatttataagcaaaaaagtgtgccattcctaatttgaagccatttatagtgcaaacaaaaatagtgcttagataatttctaagcactattttttacctaattatttgtgtctaaatgtagttttcaattaattcatatataagcgaaatttcaaaatcattaattacaatattatatttcatttccactggtttaaatatagtcttagaaacagattgaaattctttcgccttctcgtccctaaaaagattagtcatattttgcttatctgaattcaacaaaactctttctatcattagagataagtacatatataaatttaattttatttttccagaaaactgaacattgtaataatcttcatattttttcactatagtttctacttcatcaattaccatagagggatttaaaaagtttagtctatcttttattccttcaattgtcagaaatttgagaaatttttctaatacatcatcaatatttttatcttgctctcccatatcttgcaaatacatacgaagcttactaaaacctttctgatctaaaatatcataaatatttacaataggtagatcaagattggtcttaaagtcagtagttgtcataataagatcagtgttcttaaaaaactgttcgttattattatcaatataactatgcagtttgcgatagtccatagtaaaaatttgatgagtagtagatagtgacttctccataatatcttttattgctttagataaacctaaacctgataaacatgaaacaataatattctttttatttgataatccttcaaaatattgaacacctaaatactgaccgtaattttctgcttttgtagcaatctcattaaaattttcttgtctttgaactctcatagcaatatctaacgcggtagcagtagttatattattaacaactaataattctttattcaaactatgtttaatttttgtaaacatttgatttagtgagcccatatcaaaaagtaaaattatgcctttttctcttgctttttgctctaccaaatatttataaactagcttattgatatcatttactgatgcctcaattggcatatcaaatgcttcaaatatataattacctgctaaattatttactactttttgaatactttcggctgtcgatgtcccatgcgcaagtaaaatagaagtatatctaatgctttcaaccttatttattacattttgcatcatcagcaaaaaccataaataagatttatctttcaattctgtgttactccgctctaaaaatttgcgataaacataaaaagatctcgaatacttatttcttaaaagttcataatattcttgattattctgaacttttatatctaaaaaagtggaaagtctaaacgcaaatgttaaatttcttacatcgtcatcacttaagttaagatctattccgtatattcccttaatgatagtttgaaccttattaattaaagtcatattcactttatttacaaaatatattgttttgtcaaattgctttaaatcccgtagatttttaataattattaatttaaaatcactcatgactttattttgtttaatagcatcaattagttcgttttgaatattctgaaagatttttttaacacttctcttaaaaatattaagtccctttacatttaaatgcttatcaatttcaattaattcactatcatcagaactcggaatctcaacttcaatttttgacggctcctccgcaaaacttttagaacatagcattttcactctgttttgaagagttcctaaattacctatataattttgatttgccaaatcaataatagtattttcatgaactaaatattttaatttagtgtttacagcttcttgcttaaaacaatttaaaacatattcaattctttcaaatgctggtctatcgattagtggaggaatatcaatatgaactggaattcttctcataaaagtcttaagcatatacttattaagatcttccgttgtagcacaaatcagcctaatatgagcaacatgtggattttctacctcccccaaaggataaaatgtgtgattatcaattaatgaaaatagtttttcttgattagattttgagagtcgatgtacttcatctaaaaaaagatacccattgtttgccttatcaatcaatccctcagagtcatgatcagctccagtaaaagctccttttttatatccaaataatactgaagaaagtaactccgtattatttgcataatccgcagtatttaaagtgacaaacggtgcatttttatctatcactcctaaagcttttgcttcctcatatatcttcttagctagataactttttcctacaccgcttctaccagtgatcattaccggaagtccattagatgggtataaaattgattcttttgctagttcaatactttcttttaagctactatcatgaccgattatttcatcaaaaggcaactttttttcacttaatgtccacacaactggcctagtagtagacttattaactttattttgtttatataattttgctaagtaacctgaaacaacacttctgctgagattcaagccatgtgctatttgttctgtatttaattctttagacttattttgctttaaaaaagctaaaacattatctattgctttcattatggtctccgttttaaacactatttttactatttaagcactatctttgaactcttctagtccttatacgtttattatagaggcggagtgtttaaaatgataaatcaatttcaaaaaactacacaaagtcagaaacagatctttaagcagtatcaattaactagtttatccatgttaagtgattcttatactgacttagcacactacttaaaaacacaagaggaaaagaatccctatttaacagtaacttctaatagaacaaaacaaaatttagattggattacagaggacgaatctggattaacaaaaacgaaattactgcatgactttaacttagaggtaaagagtaataagttgaaatatttcggcgcaattgtaatagacaatctagatggtcatggatttctatcagactatcatcatcttatagaacaatttcctcaacagcagaaattaatcaataaagcaataaatattgttcaaaatatcggccctacaggcattgctgctagaagtgtttcagaatgtttattacttcaacttaaacataaaagcaattatcctaaaaatactgatacaatcatcaaatattatcttgaagacttagcaaatcataattttaggaaaatttatactaatctttctatttctaaagatgacctatttaaagtaatatgttttatcaaatctcttagaccgggagttgaaatcaatacagatattaataataaagttattattccagagctttttatctgttataaccataaaaaagttcttacgcatttaatcgaagataatcaattcaacttagattttaaagcacccagttattccactaatgatactgaaacgctcaaatttattaaaaagcaaaaaactcaagcaaagaatttacaaaagaattaccagcgtcgtcaagatactttgctcttgattggacaaacaattgcagaacaacaagaaatattttttgctactggaggtaaaaaatttactccattaaatgaatcacaaattgccttggaaacccatctaaacgtatctactattagtcgaacggttagaagtaaatattttcaatgcgattttggtatatttcctctgaatatactttttagtagtaaaataaacaatttctctcaaaaaaacatattaaatatgcttaaaaagataattttaaatgaaaatcaaaaaaatcctcttacagatgacgaaataaaaaataaattactaaaaaataacattgcggtttcacgacgaacaatatctaaatatcgaaaaaaattaggaattggaaattactatcaacgacaaaaaaactattttctactttagcttataagaataaattagaaaatagttcaatttatttaattttttactccaaatacaatttcctaaaatctttcaaatcctgctttgaaaaacccaattccttcgtaaagtaattttcaaaaccaccatacccagcatcaattgtttgcgtaattcctttaacagccgttccctctccttcagtaacattcattcgattaaccattttaatcatctcagaatcacttgggagctgctttttaaggccaaaagtatacaactcattagttaataaatagtcgcgtgcaatggtatgctcgtcaattccaagtccttttaaaattagagctgttgtcatccctgtacggtcttttccagcactgcaatgatagactaaggcttcattttcaggcaaagtatgtaatgctgcaaatacgcgtgcaaaagctttttgactagctgggctcaaaatcacattttgatatatctcgcctaaataactgtcaactttaggaatgtggtgcaaaaagcgataaagcttatgactatcattaacaaaattaccactgctatcttccgcatagacatgacaatccaaaacttcaacaccctgccattttcgatctggcgccattacttgttcattgctagtccttaaatcacagtctactgtgacattcatttttgctaatttttcttcgtcgcgttcagttaagctgcttaatgagtcagagcgataaatttttccccacttcacatgtttaccttcattattttcatagccaccgatatcacgaaaatttacagtaccgtcaaaagtaattaagcgattatgttccatagcttctcatcctctatcttattgtctctcatcttatattctagcttattttcttaaggaattaagtatttaagacttaggcacttactttatttacaaaatctctagcgatagttttagacataaatacagaacactttcactttgttagtttcttatctataattaatagtaataatttaccagtaaataactttcaaggaggattgcacaataatgtcaaatgaacacatagaagctctaacaattgctggtcatgatagtgatggtagcgctgggatgccagctgacttacatgccttttacgcacgtggcgtttatggtatggggctcttaactgctgccgttgctggaaattcgcaaggaatttttgctcaacaattaatgccattagattttattcaaaagcaattcgatgtcttaaatgatgatttcaaaataaaggccgttaagactggaatgcttgctaataaagatattatcgatgtagttgctaaaaacttaaaacattatcaaatgcaaaatattgtacttgatccagtgattattactaaacatggtgccacccttttagcagatgatgcataccaagcatttctaaaaaaattagtaccacttgccacaattattacaccaaacttttttgaagcacaaaagctaaccggtcttgaattgaaaaacgagtctgaaatcaagcaaggcgctaaactgttacaaaaaatgggcgctgaaaatgttttaattaaaggcagtcatcataatgacagacaaccagaagttaaagattacttactgttagatgacggctcagacgaatggttaaccaagccttactttaagactgatcgcgttaacggtacaggagatactttatcagcagtaattgcagctgaacttgcaaagggtaatgatgtcaaaactgcggttaaaattgccaaagatttcacctatgaggcactttcacatcccattaacgttggtgcaaaatatggtcccattaaccatctagctgctcaagaagaaatgaaacaataatttttactaactaggatttaagacaattttaagttatactttgaacatacaatttaaatagggatgataattatggcagataaaacaattaaaattgcatacttatatgaagacttaatgaatacttatggagattcaggtgacgtcaaagtaattcgttacttacttgacaaacaaggctatcaaactgaagttgataacatttctctagatgacaaattcgatgctaacgactacgactttttattctttggcggcggtcaagactttgaacaaactgtggtagctaaagatctgccacgtcacaaagaaacaattgaaaattatatcaacgctggcaatccaatgctttgtatctgtggtggttatcaattaatgggggattattacaagactaattctgggattacaattaaaggattaggtattctgccccttcatactgttttcaaggctgataagcggatgattggcgatactcgctacatgactgaatggggcgaagtaaaggcctttgaaaatcactctggacaaacttactttgataatactgatatgcttcatcctttcggcgaaatgattgaaggctatggtaataacccacaagataaagttgaaggcttacgttacaagaactttattggttcatattctcacggacctttacttcgaaatacaaatgtcgcaaatgcgattgttaagatgattttagaacgtcacaaggagcgtactgctaatgaagttgaatccgtttagaaaagaaagcctcaagcgttatttgggtactgataagcactttgccaaaacgcttggggcttttgacttattaactatcggtattggcgcagttattggtactggaatttttattttaccaggtactgttgccgctaaagaagctggctctggtgtaactttatcatttttagttgcagctttagtttgtactctagcaagtatgtgttatgcggaactttcctctagcatcccagtcgctggctcagcctattcctatggaaatattctttatggagaagtcattggctggattctaggctgggcactgattctagaatatatgctatccgttgcggctgtttctgctggctgggcttcttattttaattcgctgctctatagttttggtttacatataccacatcattttgaaggaccgtttgatcccctaaatggtacgtacctaaatttatgggcggttatcagtgttttattaattggaattttactctcacgtggaatgaaaacatccatgaaatttaataatgcagcagttttaattaagattgctattatatttatattcattggtgttggtttatttttcattaaaccgaaaaattatcaacctttcactccctatggtacaactggtgttttacgtggcgctacaacggtctttttcgcctttctaggctttgacgttgtttcatcctcagctgccgaagttaaaaatcctaagaaaaatatgccaattggaatcattggtaccttaattgtggcagcccttctttatatgggagtatcagttgttttaactggaatggtaaactacaagcagctaaatgtagcaaatcccgttgcctacgctttaaaattagttaaccaaggctgggtagctgacctcttatcaattggagcaattgtgggaatgagtacaatgatgcttaccatgatctattcaagttcacgtttaatttattctattggccgtgatggattattgccaaattttttaggaaaaattgataagcatggccttccagaaaatgctctttggattgtaaccatcgttattgctttaatgggagggttattttcactagaagaacttactagcttagtttcaattggaacgttacttgcctttactttcgtatctttcggcgtcattttattgcgcagaagaaaagatattcctgaaggcgactttaaagtcccattttacccaataattccaattctttctggcctagcctgcattggaatgatttgctttttatcagttaaaacttacatttttgctggtatttggttcctatttggattatttatttactgcgtttatggatataagcatagcaagattagtaaaagaaataattagttagcaaaaaagcttagttactgcacaaatatgtgtgctatcaagtaactaagctttttcttatcttttatgtttgggttcccagttaagggctaaaacggcacaaataatcataattgacccaatccaatcaattggcgccatcaccaatccaaaaataattacagaaccaattgtagctgaaaccggctcaaaagcatctaacaaactagcagttgatggtttaatatagcgaagcgagcccatcatccattgaaaaggaattaaggtacctattacaatcacgccagccatcagccaaaaaatattaatattgtttggaatcttcggccatacaggatgtgcaagtgccaaagctattcctgaaaaaagtaatcctcaacctgtaactacaagacttgaagtatgatcaagcaatctacgtggaatcaaagtattagtagctactccgactgcagaaataaggccccagaataagactgatggggttaaagatagttgattaaaatgaccatgtgtagctaaaaagaaaacacctaaaaaagcgacgatagctgcaataacatctactgcccgcaatacttggtgttcaaatactaccatataaaataagacaaaaaatggcccaataaactgtaaaacggtcgcaactgaagcatttgcctgttgaaccacgataaagtaacaatattgcacaggcaataagcctaataacccataagcaataacggtaatcgcatcttttttatcagtcattgtttttaatggctttttcccagttacctgggcaaaaatcaaaagcaaaattccacttaataccattcttacctgagaaatccaaatcggcgttatacttgcactgatattaaagagtcccttagcaaataaacccgaaatcccccaaaaaacacaagctaaagcagctaagcatgtccataatctttttttcgtcatatctttccaactttcctaatcttatgcaaaactcatcataacatactgccaaaaaattatcttttttctcttgctttttcaaagtaaatcgatttaaatataattaatataaaaattaaaaagcaatgaagagacgagtagataattttattctttcagtgaattagcgttagtgagaagctagtagaccctgaattatcgaataacactttttcgctgtgctgctagcctaaattacagtaagctacgccgtcatcggtacgttatcaaaccgaggagcatgattgtgctctattaagctggtctatttttagacaatttaggtggtaccgcggaaaaaagcctttcgtcctgagaacatcaggagtgaagggctttttctttactcttaatattttttctaaggagtacataattatgacattgatattacctaaggactaccaacccagtctaaccattcgtgatactgaagccgcaattgttttcattagagaaacttttcaagacaaaattgctgaaaaattaaatgttcaacgaatgtcagcaccaatgtttgttgaaaaatctactggattaaacgacaacttaaatggtgttgaacgccccgtttcttttgatatgaaagctatgcctaacgatacaattgaagtagttcattcactagccaaatggaaacgtctggcacttaagcgctacggatttggaatgcatgaaggtctttacactaatatgaacgcaattagacgtgatgaagatttagataatttccactcaatttacgtagaccagtgggattgggaaaaaatcatttccaaagatgagcgtaatatcgataccttaaaagatactgttaagcaaatctttaaagcaatcaaagagacagaaaaagaagttgcagcccgctaccctagctctacctatcgtttacctagcgaaattacatttattactacgcaagaactcgaagaccgctggcctgatttaacacctgatgagcgtgaagataaaattgctaaagagaaaaaagctgtatttttaatgaagattggggataagctaaaacgtagtggtaagccgcatgatggtcgcgcaccagactacgatgattggcaattaaatggtgacctcttattttggtatgaacctttacaacgtaaattagaaatctcttcaatgggaattcgtgtcagtgaagaatcactaaaaacgcaactaaaaaaagcccatgccgaagaaagagcagctttgccatttcataaaatgcttttaaacggagagcttccttatacaattggcggaggaatcggacaatctcgtttgtgcatgcttttactcggaaaagcccatattggagaagttcaagctagcatctggcctccaaaaatgattgaaaaatgtgaagcagctggaatgcaaatgttataaaaaaggagtatcggttgatactcctttttttaatacatattttcttgttctaggggctggagaattcgatcactattctcctgcattactagtatacgttttccactaatcatccacaaataaatgcataccggaacgactactgaaataatggcaactaaccattcacctgtgctcccattccaagtaccaggttgatctccattttcttgtaaaaaaattagaaaatccacaaaaaaatgcatcaacattgttaaccataacttacctgtatatagataaaccgctgcaaaaaagagtccgatagcaaatgcagaggtaacttgagcaatagttggagctaatttttgccacccgaaattagcaaaatgaagtaagccgaaaaacaaagcactaataaaaatagttattggaacttgccatttgttctttcttaaagcgtataagagaacaatgatgactagatatcgattcatctcttccattattcccgcttcagcagcttgactaaaactatttaaagtaaacttcattggatcagtatggtaggaaaaaagtacggaaaacaggttattgccgtatccaccaaatgcattccatataatatcaacaattccaaaaacaattaaaaatactaatacaccatcagagaaattagccgatttttcaaattttaaattaaagtcaaaattataaccccatccccaagctaagaaacaagcccaaatggtataggcaaaagcagcccacaatcctgtagagagaactgtattaaagaacttattgcctgggatatgtcccaatgtgcatatttccattagattttccatcatcccaaagattaaaattagacgcggaacagtccacttaacttcagcacctactgcaattgcaaaaggtattaaccatcccaatcctatcaagagaaagataacagcgactattgcgcccatgtgtggccatgcctttgctacgacattcattaattcaatcaagccacctaatgacaataaaggccaaaagataatcatcaaccatcgattgaaagtatcaacttttggtggctttttctgccagagcaccagtagtagcattaaaactaacaatggagagaagaatattagtagaaagacttcattatgttgtacccataactgatgtctcaacactggatgaaggtataaaaaaagataaaaaattactcctagtattagttcagtaattaatgcatagcgtgttttttctttcatgtggtttaacttcttcctagtattactaacatcctctcttcagtatacaaaaaaggactacctaagccaaactgcctagtagtcctttcttaaattatttactagccttacgatcttttctagagataatgaacataattaatggtaaaacaataaatccaaaaatcatcattgctattgcataccaattaattccagttacttgtccacttgcattaaccacaccaaattgtgctttccagttatattcaactaataagaaaataactaagacgattgaaagaattggaacaacaatatcagtccatatgttcttctgggcatctaagacagattctgcagtctttccacgataaaattggataactgctaacggaactacaatgaagcctagaaaacgtaccattgcacttaatgtaatcaagttaaccatgttatattcaaatgccattggaattaaaattgcaagtaatactgaaataaagaacgttctaattggaaaattattcttggttctcttagttaaactctttgaaaattggttttcacgcgccatagcttccaaaattcttggtgcattaaagctagaagcaacgttaataccaaacattgaaattaaagcacctactagaataacatcccttaaaatctcatttttaaaaattgctgcaatcgctacaacctgcttagttgtcatcaaggccttaggatcaagcaccatcgcaactgcaacaacaccaatataaactatcgcaattacgatgattgctaagggaatagcacgtggtaaattcttagctggatttttcatatcctctgaaccagaagcaacggattcaaatccagtaaaggcataaaaagctgatacaattgccattacaaagcctgtagtagttaaagttggcacaatcttttgaccattttgagtaatttgatctacttcatttaagttgcttgaagccccagtcataattaataatactactccagcaacaataattaatactaaggcagctaacttaccaagtgttgctaaattcatgacatacttaacaaccttttgaccaaataagttaatgatcgtaataacagccattaagattaaaaagccaatggtcacactcatcgttttgtttggattaccaccaaaaatagaaattgttgatttgataaccccaactgccataacaccccaagctacacttgcagaaaagtaacgtaaaatccccatatagaaacctacattatttccaaaagctgcctttgaatatgcataagcagcaccagatttagttacatattttgcagccgccgcaaaagaaacagctaaaatagaagcaaaaattgccgctataaagtatacaattaacgcttttgatccagcctgttgaacaacgctacctggcgtcaagaatattcctgaaccaataattgaattaatggctaaaagtacaatcgaccaaaagcctaatttacttgtttcattctcattcatctattattaacttctctctactctctttttgcattatcaataatatgtttaaataagttattttgataagaaacaacgcggtgaagcatttcaggatgccattgaacagcaatcactgaagcatctttattttcaattgcttctactactccatcaacacaacgagctgaaaccttaaactcaggtgcaacatctttaattaattgatggtgaaaagaatttgtctgtattttttcttttcccaacaattcagcaatcttagttcctgcaactgtttcaacagtatgagtaagtaaagttggcgtttgtccctgattgtgttttaaagtttttccttttctatagcttaagtcttggtataacgttcccccgtgatacacatttattatttgcgctccacgacaaattcctaaaacagggaccccgttttcttcagctaactttaacaatagcatgtcaaattgatctcgttcaggccaaatatctcctaatttttgttctggttcttccttataattatgaggatcaacatcatgtccaccagataaaattagaccctgcacatttaaaagttgttccttaatcacttcttcattttcattaaagggaataatataaggaattccgccattctggataacagaatcaacataatcttcattaacatagctacgacgataacctggaaaaataccactatcatcaatgattacagaaccagaaatgccaattattggtttcatgttgcactctcctttaacttactttttaccagttagattcaattatagagtatatattctactacgtaaataccacaagttaaaattagcacttttttctcacagttcactaattttttgtttcaataaaaaaatcatccttttacaggatgatttacaagctattttttctttcggtgcttaattgcataaacaattgctgctaatactaggacaccggctcccacagcaacagaaactctagtttctggattaataaacataaaaataacgattattagcaacattacaaaggcaaaataatttgaatatgggtatagcggcagcttaaatggatgtttattcatcaaatgagcattactttttctaaattttaattcagcaatcaaaattacaaaccatgctaccatccctggtaaaactgaagaactatagacgatgacaaataattctcccattgatttattcattgttgagacaattaggtttaaaacgaagccgagtaaaataccaacagtaataccaataattgcacgatcaggaacaatatgctttgatagcttaccaaatatctttggcgcttctccttcatgagccaatttaaagagcattcgactagaggagtagattccagaatttgcacccgataaggctgctgttaacacaacgaaattgataatccctgccgctgctgtaattccgaccttagtaaaagtttctacaaatggtgacccaatattacttaactggttccatggataaatggtgacaataacaaaaattgctccaacgtaaaaaattaatatacgccataaaacagactttacgctcttcactattgcttcttgcggatttgcaacttctccagctgaaattccaattaattctattccttcataagaacctgcaataattgccattgaaaagaagaagcctttcattctacccgtgaagaaaccaccatgcgaccataaattactaaagccaagtggttttccatgattacctacaccaagtaaaattaccagcaaacccaaaataatcattaatataattgttaccactttaatcattgcaaaccaaaattctaaagctccatatgctttagcactagccaagtttgctaatagcaagaaagcaataataatgatacccgaccaaaacacactaacttggggccaccaaaattttaagtattctgtagcagcgacaacttcagaaataccaacaacaatgtactgaaaaacattggcccattctgccaaatatccggctaaaggagaaatatattctgtagcataatcagcaaatgaacctgttccaggactaacatagagcatttcgccaagtgcccgcattacaatatataaaattaaccccacaaacatatacgctaataatactgaaggtcctgtccattttatagttgaagttgatcccatgaacaagccaacacctattgccccaccgagagagatcatttccatttggcctgcagtcatggatctttttaatttaggaggatgatttttcttattttccatcaacaccatcccttctatgacgaatcagatatacaattgtagctataattaatactgctgctccaactagtacagaaatccgagtttctggattaataagcataaatactacaataacaattaacattaaaaatgcgaaataattagaaataggatatagcggcaacttaaacggatgatcaactagcaaatcttgattattatgtctaaattttagttctgcaagtaaaattacaaaccatggaatcatgcctggtaacactgaggacgagaacacgattacaaataaatcctgcgtagatttattaatcgtagcagcaatcatatttacaacaaatccaatcaatattcccccggaaatacctaaaattgcatgattaggaacaatacgcttggatatatgaccaaatgtcttaggcgcatccccatcatgagctaatttaaagagcatacgactagatgaataaattccagaatttgcacctgataatgcggccgtcaaaaccacaaaattaatgatacttgctgctgctgtaattcctactttggcaaacgtagttacaaaaggtgatccaatactgcttaattcattccatggataaatggtaacaatgacaaaaattgctccaacataaaaaattaaaattctccataaaacggatttgacgctttttatgattgcttcttgtggattagcaacttcaccagcagaaattccaagtaattctattccttcgtaagagccaacgataattgacattgaaaagaaaaagccttttacgccaccagtaaagaaaccaccatgtgaccataaatttataaaaccagttggttttcctccattacctacaccaaagaaaatcacaatgaagcccaagatgatcatcaaaataatagtcacaactttgatcatagcaaaccaaaattcaagagaagcatatgcttttgcacttgctaaatttgctaaaactagaaataaaatgataattattcccgaccaaaagacattaaccttgggccaccaaaattttaaatattcagttgccgctaccacttcagacattccaacaacaatatattcaaatacattagcccactctgctagatagccagctaatggatgcacatactcagttgcataatcagcaaatgacccagtacctggatttacatatagcatttctcctaaggcacgcattacaatgtataaaattaagccgacaaacatatacgctaataaaacggatggtcccgtccattttattgtagaggtagatcccataaataatccgaccccaattgcaccgcccaaagatatcatttccatttgaccagcagtcatagaacgctttaacttcggaattgactttttatttcccattacttaatgccactcctataaaaaaactagcagtcactcgagagctagttttaaatatcaacaaattgattaatgtcattttaatacaggtaagcagcaattccaagaactttttgacaaaaaataaggaactcagtcctaaaaccaagttcctttttaatttcgtgtaaaattacgtttgatcttttgccaaattgtaagagctcttctcatattgtttgctggaacatgctttcgaatagcacgcaaagttggctttacatgtcttgcagcaaagataaaactaccattttttttagtgcaaatcttaaatcgtggaatatattttccaccaaaatatacatctgctactacaacagttacttcgttccaaggaatctgaacataatcattaggattgttatcactatagaattcgaatcccttgtcaccaacaagaatttttccatatgtaggaattcctctaaaccaagtcgcagtatcaacatattctgattttgtatttagtgattgaaccatataaaaaccttttcatatataagaaaaacggtctagagcagaccgtcttttacttattattgttatagtaagccaattacgtgacctaaaataccaacaacgaagataccaataataataacaattggtgaaactttcttttttagtaaccacatacataagaaagttaatagcaatgcagcaagaccaggaattaaactatctaagttttgttgcaaagttgtttccttaattttatctaaggccataccattacctaaattatattcagataatgctttgtgaataccttctgctccctttggaagagcgttccaatcgatgtaagcacccttttgaagtggaacacttgaaacaactggcttaaagttaatcgttacccaacgttcaattaaggcaccaataacaaacatacccatcattgaagcaccacgagtgatcttttgtaataaaccacctgaagcatcttcagtaatcttagtaccagctttgtaacccatttcttgagtgtaccataagaatgccatacgaattacattccataatacaaagaataagataggacctaagatgtttccgctcaaagcaagtgaagcacctaatgatccaataataggacgaactgtgtaccagaatacaggatcaccaacaccagctaaaggacccatcataccaactttaacaccttgaatggcggtattatcaacatcagcaccattagccttatcctcttctagagcaagagtaacaccaataataggtgatgctaagtaagggtgtgtgttaaagaattccaagtgtctctttaatgcaagagataaatccttcttttctggatacaattttcttaaggctgggattaaactgtatgcccaaccaccgttttgcattctttcatagttccatgaaccttgaaggaaagtagaacgccaccaaaccttaatacgatctgatttacttaaagttaatttcttttttgcagtttcagtcatttataattagcctcctctcgctcaaattttaatagtcatccaggatgtcgcccaatgggtcgcctgaaccagaattagagttattattgtttccacccttagaaccttcaagagcaaggtacataatagcaagtgaaataccaataccaccaagagcgatcaaagttaattccttaacagctgctaaacagaaaccaataatgaagaatggccatacttcacggctagccatcatattaataaccattgcgtaacctacggcaacaaccataccaccaccaatggtcataccttcgttcaaccatgcaggcattgcgtttaagccagcccgaacaacggaagcaggaatggcaagtaataaagctgctggaatagcaattcttaaaccttgtaaagcaacagcaatcatttgccaacgatcaatagctttccagttagcttcttctgcttttctacccataatatgaacaatagcaactgaaatagtacgaactaacatagttaagaataatccagcaacagccaatggaatagcaataccaatagcagtaccaatacccttttgtccttgtccaccttgtaccaaaataatagttgaagcaacagatgctaaagcagcatcaggcgcaacagcagcaccaatattagcccaacctaaagcaatcatttgtagtgaaccgccaagaataatacctatagttaagttaccagtaactaaaccaattaaagtacatgccactagaggttgatggaattggaattcgtcaagaatccctcccatacctgcaaagaaggcaacgatcactaccagaatcatctgaatagcattcatttataaaaatccccctataatttatttcttttcatcaactaatttttgagctttttccaaaagttcatccatattttgcttaccatcagaaggaactttacggacatcaaacttaacgcccaaatcttttaattttttatatgtatcaatatctttttgatccattgccaaaacagtattgacattaactttaccatcgctataagccatggaaccgatattcaattctttgatatccattccaccttcaatagctttaagcgcgtcttctggattttcaaataaaattaatgctttagtatttccaaaccgtggatcttttactactttaagcattttatcgattggaacaacgtttgcaggtacaccagctggagcggcttccttaatcattgtcttacgaattttatccttagcaacattatctgaaacaacaataatccgatttggattcattgctttagtccaaccagttgcaacttgaccatgaagaagacgtgaatcgattctagctaaaacatatttaatgtggccatcaccgataacagtgccttctggaattgcaccttgtggctgtgcgtcagaactagaagctgatttagcagtagtctctttaggcataagagattcaggttgcgtcttaattccatcacgacctggcttaacaatggctttggcaatatcatgggcattatcacttcccattctttgacctaaagcttcaataaccattggtaagttcataccagaaacaatagcccaagtatattcatgttctttaacaagattgtttgcttggttaaatggcgtacctccccataaatcgatcaaaaacaagacttggtcttgatcatcaaaagaagcaaccgccttttccatcttagctctaatatcatcaggaccttcatccggcttcaaaatcacatgagcaagattttcttgcttaccgaaaatcatctcagcagattgaaaaattccatcagcaaagccaccgtgactagctaggacaattcctaccatttgatttcccccttaatcaaaatatcttcacgaatactttatagcgaaataaatgtatacttttacttttaatatcataccatttttttgctgaaaatgcttgcataatagcaaaaaaattcaaaaaataatatctatacagaataaaaaaagagagaatgaagttatttctccattctccctcttttatttcttcgctttaccttactccggctgtcagactcgaactgacgacaacctgattaacagtcaggtgctctaccaactgagctaagccggaatattaaaaaagagcacggcgactgcctaccctcgcaggcagtttcccaccaactactctcggcgttaagaagcttaacttctgtgttcggcatgggaacaggtgtatccttcttgccatcgccaccgtactctttctgagcttttacactcaaaactgaatataatcttccgctctaaacctttgagctttggtcaagtgctcgactgattagtactagtccgctccacatatcgctatgcttccactcctagcctatctacctcatcgtctttaaggtgtcttactgcttacgcatcggaaatctcatcttgaggggggcttcgcacttagatgctttcagcgcttatcccttccatacatagctacccagcgatgcttttggcaagacaactggtacaccagcggtatgtccatcccggtcctctcgtactaaggacagctcctctcaaatttcctacgcccacgacggatagggaccgaactgtctcacgacgttctgaacccagctcgcgtgccgctttaatgggcgaacagcccaacccttgggaccgacttcagccccaggatgcgacgagccgacatcgaggtgccaaacctccccgtcgatgtgaactcttgggggagataagcctgttatccccagggtagcttttatccgttgagtgatggcctttccatgcagtaccaccagatcactaagcccgactttcgtccctgctcgaggtgtacctctcgcagtcaagctcccttatacctttacactctgcgaatgatttccaaccattctgagggaacctttgggcgcctccgttacattttaggaggcgaccgccccagtcaaactgcccacctgacactgtcctccagaacgctcagctctgcgagttagaggatccatcaaacaagagtagtatcccaacattgcctccagtaagactagcgtcctactttctctggctcctacctatcctgtacatgtttaacaaatactcaatatcaagctacagtaaagctccatggggtctttccgtcctgtcgcgggtaacccgcatcttcacgggtattataatttcaccgagtctctcgttgagacagtgcccaaatcattacacctttcgtgcaggtcggaacttacccgacaaggaatttcgctaccttaggaccgttatagttacggccgccgtttactggggcttcaattcaaaccttcgcttgcgctaagctctcctcttaaccttccagcaccgggcaggtgtcagcacctatacgtcatcttacgattttgcagatacctgtgtttttgataaacagttgtttgggcctattcactgcggctgatcttttaccatcagcaccccttctcccgaagttacggggtcattttgccgagttccttaacgagagttctctcgctcacctgagtgttctccactcgactacctgtgtcggtttgcggtacgggtaaaattgctctggctagaagcttttcttggcagtgtgacatcatgaccttcgctactttgatttcactccgcgtcacagcttgaaatctaaaaataagcatttgactcatcttttttcttactgcttgcacatgtttttccagctacatgcgtcattagcctcctgcgtccctcctttgctcttatcgaacaatttcagtacaggaatctctacctgttgtccatcggctacgcctctcggccttaccttaggtcccgacttaccctgggcggacgagcctgccccaggaaaccttagtctttcggcggataggattctcacctatctttcgctactcataccggcattctcacttctaagcgctccattagtcctctcgatctaacttcgccgctcttagaacgctctcctaccacgcatatcctttgatatgcatccacagtttcggtactatgcttagccccggtacattttcggcgcagcgtcactcgactagtgagctattacgcactctttaaatggtggctgcttctaagccaacatcctagttgtctacgcaactccacatccttttccacttagcatagatttggggaccttaactggtgatctgggctgtttccctttcgactacggatcttatcactcgcagtctgactcccgtgcattgatatctggcattcggagtttatctggattcagtaacccctgacgggcccctagtccaaacagcgctctacctccattatcattcacacgaggctagccctaaagctatttcggagagaaccagctatctccaagttcgtttggaatttcaccgctacccacaactcatccccgcgatttttaactcacgtgggttcggtcctccagcgtgttttaccacgccttcaacctggtcatgggtaggtcacttggtttcgggtctacgtcatgatactctctcgccctcttcagactcgctttcgctccggctccgtcttttctgacttaaccttgcaccataacgtaactcgccggttcattctacaaaaggcacgccattacactttaatgtgctttgactacttgtaggcacacggtttcaggttctctttcactccccttccggggttcttttcacctttccctcacggtactggttcactatcggtcactagttagtatttagccttgcgagatggtcctcgcggtttcaatcgggattcctcgtgtcccgacctactcaggatcctgctaagtctctctgcaatttcgcttacggggctctcaccctctctggcttatctttccagataattctgctatcgcttcaagtactttattgcagtcctactaccccaactggcaagccagctggtttgggctctttcctgttcgctcgccgctacttgggaaatcgatttttctttctcttcctgcagctacttagatgtttcagttcactgcgtcttccttcaacagccttaacagctcttgataatacctcgcggtattgggttcccccattcggatatctccggatcatcgcttacttactgctccccgaagcctttcgtggttcgtcacgtccttcatcggcttctagtgcctaggcattcaccatgcgcccttttctacttgacctatttcaagttgagtttctctcttctcggtcgctcttcaatctgttttttcgattgtctcggttttttgctttagattatattcagttttcaatgtactaacccttgagacacaacggtctcaatggaggctaacgggatcgaaccgatgacctcctgcgtgcaaagcaggcgctctcccatctgagctaagcccccatcattgccttttatcaaagctttcactttgaatgggcctaaatggacttgaaccatcgacctcacgcttatcaggcgtgcgctctaaccagctgagctataggcccgattgtgcttggcttgttattcaagttgtttgaggtaataccctcaaaactaaacaaagtttctcagtgtgcttccgcttggctttctcgatgacttctctttagtgctctcgcactctccatcatctttcgccttccttagaaaggaggtgatccagccgcaggttctcctacggctaccttgttacgacttcaccctaatcatctgtcctaccttagacggctgactcctataaaggttatcccaccggctttgggtgttacagactctcatggtgtgacgggcggtgtgtacaaggcccgggaacgtattcaccgcggcgtgctgatccgcgattactagcgattccagcttcgtgtaggcgagttgcagcctacagtccgaactgagaacggctttcagagatccgcttgccttcgcaggttcgcttctcgttgtaccgtccattgtagcacgtgtgtagcccaggtcataaggggcatgatgacttgacgtcatccccaccttcctccggtttgtcaccggcagtctcattagagtgcccaacttaatgatggcaactaatgacaagggttgcgctcgttgcgggacttaacccaacatctcacgacacgagctgacgacagccatgcaccacctgtctcagcgtccccgaagggaactcctaatctcttaggtttgcactggatgtcaagacctggtaaggttcttcgcgttgcttcgaattaaaccacatgctccaccgcttgtgcgggcccccgtcaattcctttgagtttcaaccttgcggtcgtactccccaggcggagtgcttaatgcgttagctgcagcactgagaggcggaaacctcccaacacttagcactcatcgtttacggcatggactaccagggtatctaatcctgttcgctacccatgctttcgagcctcagcgtcagttgcagaccagagagccgccttcgccactggtgttcttccatatatctacgcattccaccgctacacatggagttccactctcctcttctgcactcaagttcaacagtttctgatgcaattctccggttgagccgaaggctttcacatcagacttattgaaccgcctgcactcgctttacgcccaataaatccggacaacgcttgccacctacgtattaccgcggctgctggcacgtagttagccgtgactttctaagtaattaccgtcaaataaaggccagttactacctctatctttcttcactaccaacagagctttacgagccgaaacccttcttcactcacgcggcgttgctccatcagacttgtgtccattgtggaagattccctactgctgcctcccgtaggagtttgggccgtgtctcagtcccaatgtggccgatcagtctctcaactcggctatgcatcattgccttggtaagccgttgccttaccaactagctaatgcaccgcaggtccatccaagagtgatagcagaaccatcttttaaactctagacatgcgtctactgttgttatccggtattagcatctgtttccaggtgttatcccagtctcttgggcaggttacccacgtgttactcacccgtccgccgctcgcttgtatctagtttcatttggtgcaagcaccaaattcatctaggcaagctcgctcgacttgcatgtattaggcacgccgccagcgttcgtcctgagccaggatcaaactctcattttccttcttgaaaatgagctgtttatcgtttagctctaaaactttctttgagttatctcaaatttattgcttgcgaattgacttcgcttttgtttgggattttttatatcccgcacactttcagcgaaactttgttcagttttcaaggtactaccgttgctgtgtgacaacttttatattatatcatgcctcttgagttttgacaagtcttttttcctctttctcatctctctcaaatgacagccttataatattatcatctttccttgcttttggcaagtatattcttatcttttttgataaaaataggagccttattgactccattggctccggctgtcagactcgaactgacgacaacctgattaacagtcaggtgctctaccaactgagctaagccggaatattaaaaaagagcacggcgactgcctaccctcgcaggcagtttcccaccaactactctcggcgttaagaagcttaacttctgtgttcggcatgggaacaggtgtatccttcttgccatcgccaccgtactctttctgagcttttacactcaaaactgaatataatcttccgctctaaacctttgagctttggtcaagtgctcgactgattagtactagtccgctccacatatcgctatgcttccactcctagcctatctacctcatcgtctttaaggtgtcttactgcttacgcatcggaaatctcatcttgaggggggcttcgcacttagatgctttcagcgcttatcccttccatacatagctacccagcgatgcctttggcaagacaactggtacaccagcggtatgtccatcccggtcctctcgtactaaggacagctcctctcaaatttcctacgcccacgacggatagggaccgaactgtctcacgacgttctgaacccagctcgcgtgccgctttaatgggcgaacagcccaacccttgggaccgacttcagccccaggatgcgacgagccgacatcgaggtgccaaacctccccgtcgatgtgaactcttgggggagataagcctgttatccccagggtagcttttatccgttgagtgatggcctttccatgcagtaccaccagatcactaagcccgactttcgtccctgctcgaggtgtacctctcgcagtcaagctcccttatacctttacactctgcgaatgatttccaaccattctgagggaacctttgggcgcctccgttacattttaggaggcgaccgccccagtcaaactgcccacctgacactgtcctccagaacgctcagctctgcgagttagaggatccatcaaacaagagtagtatcccaacattgcctccagtaagactagcgtcctactttctctggctcctacctatcctgtacatgtttaacaaatactcaatatcaagctacagtaaagctccatggggtctttccgtcctgtcgcgggtaacccgcatcttcacgggtattataatttcaccgagtctctcgttgagacagtgcccaaatcattacacctttcgtgcaggtcggaacttacccgacaaggaatttcgctaccttaggaccgttatagttacggccgccgtttactggggcttcaattcaaaccttcgcttgcgctaagctctcctcttaaccttccagcaccgggcaggtgtcagcacctatacgtcatcttacgattttgcagatacctgtgtttttgataaacagttgtttgggcctattcactgcggctgatcttttaccatcagcaccccttctcccgaagttacggggtcattttgccgagttccttaacgagagttctctcgctcacctgagtgttctccactcgactacctgtgtcggtttgcggtacgggtaaaattactctggctagaagcttttcttggcagtgtgacatcatgaccttcgctactttgatttcactccgcgtcacagcttgaaatctaaaaataagcatttgactcatcttttttcttactgcttgcacatgtttttccagctacatgcgtcattagcctcctgcgtccctcctttgctcttatcgaacaatttcagtacaggaatctctacctgttgtccatcggctacgcctctcggccttaccttaggtcccgacttaccctgggcggacgagcctgccccaggaaaccttagtctttcggcggataggattctcacctatctttcgctactcataccggcattctcacttctaagcgctccattagtcctctcgatctaacttcgccgctcttagaacgctctcctaccacgcatatcctttgatatgcatccacagtttcggtactatgcttagccccggtacattttcggcgcagcgtcactcgactagtgagctattacgcactctttaaatggtggctgcttctaagccaacatcctagttgtctacgcaactccacatccttttccacttagcatagatttggggaccttaactggtgatctgggctgtttccctttcgactacggatcttatcactcgcagtctgactcccgtgcattgatatctggcattcggagtttatctggattcagtaacccctgacgggcccctagtccaaacagcgctctacctccattatcattcacacgaggctagccctaaagctatttcggagagaaccagctatctccaagttcgtttggaatttcaccgctacccacaactcatccccgcgatttttaactcacgtgggttcggtcctccagcgtgttttaccacgccttcaacctggtcatgggtaggtcacttggtttcgggtctacgtcatgatactctctcgccctcttcagactcgctttcgctccggctccgtcttttctgacttaaccttgcaccataacgtaactcgccggttcattctacaaaaggcacgccattacactttaatgtgctttgactacttgtaggcacacggtttcaggttctctttcactccccttccggggttcttttcacctttccctcacggtactggttcactatcggtcactagttagtatttagccttgcgagatggtcctcgcggtttcaatcgggattcctcgtgtcccgacctactcaggatcctgctaagtctctctgcaatttcgcttacggggctctcaccctctctggcttatctttccagataattctgctatcgcttcaagtactttattgcagtcctactaccccaactggcaagccagctggtttgggctctttcctgttcgctcgccgctacttgggaaatcgatttttctttctcttcctgcagctacttagatgtttcagttcactgcgtcttccttcaacagccttaacagctcttgataatacctcgcggtattgggttcccccattcggatatctccggatcatcgcttacttactgctccccgaagcctttcgtggttcgtcacgtccttcatcggcttctagtgcctaggcattcaccatgcgcccttttctacttgacctatttcaagttgagtttctctcttctcggtcgctcttcaatctgttttttcgattgtctcggttttttgctttagattatattcagttttcaatgtactagctctctgaggtaataccctcaaaactaaacaaagtttctcagtgtgcttccgcttggctttctcgatgacttctctttagtgctctcgcactctccatcatctttcgccttccttagaaaggaggtgatccagccgcaggttctcctacggctaccttgttacgacttcaccctaatcatctgtcctaccttagacggctgactcctataaaggttatcccaccggctttgggtgttacagactctcatggtgtgacgggcggtgtgtacaaggcccgggaacgtattcaccgcggcgtgctgatccgcgattactagcgattccagcttcgtgtaggcgagttgcagcctacagtccgaactgagaacggctttcagagatccgcttgccttcgcaggttcgcttctcgttgtaccgtccattgtagcacgtgtgtagcccaggtcataaggggcatgatgacttgacgtcatccccaccttcctccggtttgtcaccggcagtctcattagagtgcccaacttaatgatggcaactaatgacaagggttgcgctcgttgcgggacttaacccaacatctcacgacacgagctgacgacagccatgcaccacctgtctcagcgtccccgaagggaactcctaatctcttaggtttgcactggatgtcaagacctggtaaggttcttcgcgttgcttcgaattaaaccacatgctccaccgcttgtgcgggcccccgtcaattcctttgagtttcaaccttgcggtcgtactccccaggcggagtgcttaatgcgttagctgcagcactgagaggcggaaacctcccaacacttagcactcatcgtttacggcatggactaccagggtatctaatcctgttcgctacccatgctttcgagcctcagcgtcagttgcagaccagagagccgccttcgccactggtgttcttccatatatctacgcattccaccgctacacatggagttccactctcctcttctgcactcaagttcaacagtttctgatgcaattctccggttgagccgaaggctttcacatcagacttattgaaccgcctgcactcgctttacgcccaataaatccggacaacgcttgccacctacgtattaccgcggctgctggcacgtagttagccgtgactttctaagtaattaccgtcaaataaaggccagttactacctctatctttcttcactaccaacagagctttacgagccgaaacccttcttcactcacgcggcgttgctccatcagacttgtgtccattgtggaagattccctactgctgcctcccgtaggagtttgggccgtgtctcagtcccaatgtggccgatcagtctctcaactcggctatgcatcattgccttggtaagccgttgccttaccaactagctaatgcaccgcaggtccatccaagagtgatagcagaaccatcttttaaactctagacatgcgtctactgttgttatccggtattagcatctgtttccaggtgttatcccagtctcttgggcaggttacccacgtgttactcacccgtccgccgctcgcttgtatctagtttcatttggtgcaagcaccaaattcatctaggcaagctcgctcgacttgcatgtattaggcacgccgccagcgttcgtcctgagccaggatcaaactctcattttccttcttgaaaatgagctgtttatcgtttagctctaaaactttctttgagttatctcaaatttattgcttgcgaattgacttcgcttttgtttgggatttttatatcccgcacactttcagcgaaactttgttcagttttcaaggtactaccgttgctgtgtgacaacttttatattatatcatgcctcttgagttttgacaagtcttttttcctctttctcatctctctcaaatgacagccttataatattatcatctttccttgcttttggcaagtatattcttatcttttttgataaaaataggagccttattgactccattggctccggctgtcagactcgaactgacgacaacctgattaacagtcaggtgctctaccaactgagctaagccggaatattaaaaaagagcacggcgactgcctaccctcgcaggcagtttcccaccaactactctcggcgttaagaagcttaacttctgtgttcggcatgggaacaggtgtatccttcttgccatcgccaccgtactctttctgagcttttacactcaaaactgaatataatcttccgctctaaacctttgagctttggtcaagtgctcgactgattagtactagtccgctccacatatcgctatgcttccactcctagcctatctacctcatcgtctttaaggtgtcttactgcttacgcatcggaaatctcatcttgaggggggcttcgcacttagatgctttcagcgcttatcccttccatacatagctacccagcgatgcctttggcaagacaactggtacaccagcggtatgtccatcccggtcctctcgtactaaggacagctcctctcaaatttcctacgcccacgacggatagggaccgaactgtctcacgacgttctgaacccagctcgcgtgccgctttaatgggcgaacagcccaacccttgggaccgacttcagccccaggatgcgacgagccgacatcgaggtgccaaacctccccgtcgatgtgaactcttgggggagataagcctgttatccccagggtagcttttatccgttgagtgatggcctttccatgcagtaccaccagatcactaagcccgactttcgtccctgctcgaggtgtacctctcgcagtcaagctcccttatacctttacactctgcgaatgatttccaaccattctgagggaacctttgggcgcctccgttacattttaggaggcgaccgccccagtcaaactgcccacctgacactgtcctccagaacgctcagctctgcgagttagaggatccatcaaacaagagtagtatcccaacattgcctccagtaagactagcgtcctactttctctggctcctacctatcctgtacatgtttaacaaatactcaatatcaagctacagtaaagctccatggggtctttccgtcctgtcgcgggtaacccgcatcttcacgggtattataatttcaccgagtctctcgttgagacagtgcccaaatcattacacctttcgtgcaggtcggaacttacccgacaaggaatttcgctaccttaggaccgttatagttacggccgccgtttactggggcttcaattcaaaccttcgcttgcgctaagctctcctcttaaccttccagcaccgggcaggtgtcagcacctatacgtcatcttacgattttgcagatacctgtgtttttgataaacagttgtttgggcctattcactgcggctgatcttttaccatcagcaccccttctcccgaagttacggggtcattttgccgagttccttaacgagagttctctcgctcacctgagtgttctccactcgactacctgtgtcggtttgcggtacgggtaaaattactctggctagaagcttttcttggcagtgtgacatcatgaccttcgctactttgatttcactccgcgtcacagcttgaaatctaaaaataagcatttgactcatcttttttcttactgcttgcacatgtttttccagctacatgcgtcattagcctcctgcgtccctcctttgctcttatcgaacaatttcagtacaggaatctctacctgttgtccatcggctacgcctctcggccttaccttaggtcccgacttaccctgggcggacgagcctgccccaggaaaccttagtctttcggcggataggattctcacctatctttcgctactcataccggcattctcacttctaagcgctccattagtcctctcgatctaacttcgccgctcttagaacgctctcctaccacgcatatcctttgatatgcatccacagtttcggtactatgcttagccccggtacattttcggcgcagcgtcactcgactagtgagctattacgcactctttaaatggtggctgcttctaagccaacatcctagttgtctacgcaactccacatccttttccacttagcatagatttggggaccttaactggtgatctgggctgtttccctttcgactacggatcttatcactcgcagtctgactcccgtgcattgatatctggcattcggagtttatctggattcagtaacccctgacgggcccctagtccaaacagcgctctacctccattatcattcacacgaggctagccctaaagctatttcggagagaaccagctatctccaagttcgtttggaatttcaccgctacccacaactcatccccgcgatttttaactcacgtgggttcggtcctccagcgtgttttaccacgccttcaacctggtcatgggtaggtcacttggtttcgggtctacgtcatgatactctctcgccctcttcagactcgctttcgctccggctccgtcttttctgacttaaccttgcaccataacgtaactcgccggttcattctacaaaaggcacgccattacactttaatgtgctttgactacttgtaggcacacggtttcaggttctctttcactccccttccggggttcttttcacctttccctcacggtactggttcactatcggtcactagttagtatttagccttgcgagatggtcctcgcggtttcaatcgggattcctcgtgtcccgacctactcaggatcctgctaagtctctctgcaatttcgcttacggggctctcaccctctctggcttatctttccagataattctgctatcgcttcaagtactttattgcagtcctactaccccaactggcaagccagctggtttgggctctttcctgttcgctcgccgctacttgggaaatcgatttttctttctcttcctgcagctacttagatgtttcagttcactgcgtcttccttcaacagccttaacagctcttgataatacctcgcggtattgggttcccccattcggatatctccggatcatcgcttacttactgctccccgaagcctttcgtggttcgtcacgtccttcatcggcttctagtgcctaggcattcaccatgcgcccttttctacttgacctatttcaagttgagtttctctctcttctcggtcgctcttcaatctgttttttcgattgtctcggttttttgctttagattatattcagttttcaatgtactagctctctgaggtattaccctcaaaactaaacaaagtttctcagtgtgcttccgcttggctttctcgatgacttctctttagtgctctcacactctccatcatctttcgccttccttagaaaggaggtgatccagccgcaggttctcctacggctaccttgttacgacttcaccctaatcatctgtcctaccttagacggctgactcctataaaggttatcccaccggctttgggtgttacagactctcatggtgtgacgggcggtgtgtacaaggcccgggaacgtattcaccgcggcgtgctgatccgcgattactagcgattccagcttcgtgtaggcgagttgcagcctacagtccgaactgagaacggctttcagagatccgcttgccttcgcaggttcgcttctcgttgtaccgtccattgtagcacgtgtgtagcccaggtcataaggggcatgatgacttgacgtcatccccaccttcctccggtttgtcaccggcagtctcattagagtgcccaacttaatgatggcaactaatgacaagggttgcgctcgttgcgggacttaacccaacatctcacgacacgagctgacgacagccatgcaccacctgtctcagcgtccccgaagggaactcctaatctcttaggtttgcactggatgtcaagacctggtaaggttcttcgcgttgcttcgaattaaaccacatgctccaccgcttgtgcgggcccccgtcaattcctttgagtttcaaccttgcggtcgtactccccaggcggagtgcttaatgcgttagctgcagcactgagaggcggaaacctcccaacacttagcactcatcgtttacggcatggactaccagggtatctaatcctgttcgctacccatgctttcgagcctcagcgtcagttgcagaccagagagccgccttcgccactggtgttcttccatatatctacgcattccaccgctacacatggagttccactctcctcttctgcactcaagttcaacagtttctgatgcaattctccggttgagccgaaggctttcacatcagacttattgaaccgcctgcactcgctttacgcccaataaatccggacaacgcttgccacctacgtattaccgcggctgctggcacgtagttagccgtgactttctaagtaattaccgtcaaataaaggccagttactacctctatctttcttcactaccaacagagctttacgagccgaaacccttcttcactcacgcggcgttgctccatcagacttgtgtccattgtggaagattccctactgctgcctcccgtaggagtttgggccgtgtctcagtcccaatgtggccgatcagtctctcaactcggctatgcatcattgccttggtaagccgttgccttaccaactagctaatgcaccgcaggtccatccaagagtgatagcagaaccatcttttaaactctagacatgcgtctactgttgttatccggtattagcatctgtttccaggtgttatcccagtctcttgggcaggttacccacgtgttactcacccgtccgccgctcgcttgtatctagtttcatttggtgcaagcaccaaattcatctaggcaagctcgctcgacttgcatgtattaggcacgccgccagcgttcgtcctgagccaggatcaaactctcattttccttcttgaaaatgagctgtttatcgtttagctctaaaactttctttgagttatctcaaatttattgcttgcgaattgacttcgcttttgtttgggatttttatatcccgcacactttcagcgaaactttgttcagttttcaaggtactaccgttgctgtgtgacaacttttatattatatcatgcctcttgagttttgacaagtcttttttcctctttctcatctctctcaaatgacagccttataatattatcatctttctgctctcttgacaagcttctcgctttgcctcctggctctgcttcttgcttgcctcaaacagcatgtattactttacagacttttctccttttcgtcaaccccttttttctaaaaattagcaatatttttttagagtgctaaaaaaggtctcattttgtgagaccttttattgtttttgtaatttagaatgtcttacaccatacgttacatatacaactattccggctattaaccaaattcctaccataatttttgtcatttttggcagcatccagatgaaatatacgctcagtaatccagatattattggtaaaaccggataaaatggcattttgaatccattatttacaatatcttttctatgacgaagcggaataattccaaaagatattaaagcaaaagcaattaaagtgccagcatttattaaagacgctaattccatcaatgggactaacccagcaaaaatagctgctactatagtggaaacgattacagcatgatcaggaatcatctttttagcatgtacactccccattgagtcaggtaataatccatctcttcctaaagcatagagtaatcttgatccacctagtagcattgtaatcattgccgtaaaaattcctaccaacgccccaactgtgattaacttattccaagcagttaatccgacaacttttagtgcatatgccgctggatcgtcaacatttaatcgcttatagttgaccatcccagtcaaaactaaagaaaaactaacataaagtaatactgcaataattactgttcccataattcctttaactacatttttagcaggatctttagtttcagcactattagctgctaaagcgtcaaagccaatgaaagcaaagaatactgtcgctgctgctgtagaaattccacccattcctaatggcggagtttgaaatttcttaggataaaaaggaacataattttctgccttaatatagaaaagtccaatcacaataaacaaaatgataatagcaaccttaataattactgctatgttttctacctgtttcgataaattagcgccttgatataaaattagagctacaatcaagacaatcaagactgcagaaagattaattactccgccctccattggtcccgcttcaagagccttaggcaaatgaataccaattggcgccaaaatattattattaaaataagaagcaaaacctgttgcttcggcagaaacagccaagaaatattctaatagtagtccccatccgattatccaacccacaatttctccgtaaatcactgagccaaaagaataagcagatccagccactggcatagcagaggagaactcagcatatgccattccaaccataccagaaacaattgccgctagcaaaaacgaaatcgcaacagcaggtccagcatgttgagcggcttcatgaccaggtaaaataaaaatgcctgttccaataactgccccaattcccagtgcaactaaatcacgtgcatttaaatgtctagttaagcgagaatccgcttttaaaaaagtatttactggaactttcttaaagaaatttttcattccaattctccttaatttatttttaattattatacctgattttgtcgggaattctaccctataattaaaattaattaaaaaaaaagagacggtgaattaatccaccgtctcttttcaagcaaaatagtattaactatttattttcttttttatcagctttttcagcttctttaacgtctttcttttcttgttcgcgtgtttctttatcaaacaatacgtcttcaagtacttcaccatttaagtataagtgcttatcgtcgatggtgaacttaacttccttagtatcaggcttagaaacaattaacttagcagctggggtttcaagatcttgttcaacaactcttctcaatggacgagcaccgaattctttatcatatcccttcttagccaagtacttcttagcatcagcagtaacatgaagtttgatgtttctcttagcaagtgatttctccatcttagctaagtaaagatctaaaatcttaagcatatcttcgctagtcaatgaattgaatggcacaattgcatcaagacggttcaagaattctggtctgaagtaaacttcaagtgccttacgtaaagcatcttgatcgtcacccttaagtaacttatcagagtatccagcgtttgaagtcatgatgatgatagtatccttgaaggaaattgttctaccttgtgcgtcagtcaagcggccatcatccataatttgaagtaaggcattgaagacttgtgggtttgccttttcaatttcgtcaagcaagatcaaagaatatggttggtgacgaatcttttcagtcaattgtccgccttcaccataaccaacataacctggtgctgaaccaattaacttgttaacagccatttggtcttggtattctgacatatccaaacgtactaaggcatcagccttaccgaacaacttaattgctaactgcttagccaattcagtcttaccaacaccagtaggaccagtaagtaagaatgaaccagttggacggttagaatccttaaatacttgcttacgagcaattgcatcagtgatgatatcaatggccttatcttggtcaatgacaaccttcttcaagtcagcagctaagttagcgttcttttgagcttcatttgcattaatttcactcattggaataccagtcttagtttgaatcaaagagtacatatcttctggtgtaactttaagttcactagctttacccgcagtcttgagatctttcttgaggtcttcaatttctttcttaagcttagcagcttcatcatatttttcatttttagctgcttctgcctttttaccttctaaggcatgaatcttattcttgattgaagtttcatccttttgatccatccctaaggacttcttagcaccagcttcatccattaaatcaatggccttatctggtaaatgacgatcattgatgtaacgatttgaaagttcagcagcaagctttaatgcttctggatcgtattttacattgtgatacttctcatatcttggagctaagcctttcaaaatttgaacagcatcttcaatcgttggctctggtacttgaactggttggaatcttctagctaaagctggatccttttcgatttgttggtactcactagtagtagttgcaccaatcagacaaatttcaccacttgctaatgctggtttcaaaatattagcagcatccccagaattgttttctgagtcagtagaacctgccccaacaatattatgtaattcatcgataaagagaataacattcttgtcacccttagctttatcaataatcttctttaatttttcttcaaaactaccacgaagagaagtacctgcaactaactcattaatgttcaactcaataatgtgggcgttcttaagtttttcaggaacgtctccatcaacgattctttgagctaagccttcaactactgaagttttaccaacaccagcaggtccagttaaaacaggattgttcttcttacgtctacttaaaatttcaataacttggtcaataacagctgtacgtccaatgacaggatcatatttaccctttttagcttgttcagttaaatcaacaccaattggcttttccttttgttgttggccattttgtgctcctggttgaggtgcttgaccagcactatatctcattggttgttgaccattggtcattcttccatcattgaaaaagtctctgtttaattcattaaacaaatcatcaaaattgtagtttccattgtcaaagtatgccatgctttacacactccacatattctcaaaaattttagcacttgtaactaatgagtgctaactactcacattttttattataacaggttatccacagaaagccaaatattatatcatgttttttccacagattattttaatttgtgaacaaaagaagcacaatacgctattcaaagtgcattgtgcttaaataatttgtgaattaatatgtcagatttgtttctaaattatttgtttttattatttttccaatcttttaattatttaacttttggtcttgcttttttcgacttcctcttggtctttgaccatttccttgcgtgttatctccaatagtgctttcaagcaagtattgttcaattagctgaactacttgcttattctgcggcaatgatgagtgctgagcatcagctccagtaacagtcatcgtagtataatgttttacttgattttggaaaatatattttcctgcagctacactactttctggaaccaacccatcagattcataattctgtccgcctgatacagaatatacatctaaattctgtggtattttctttcgattcttaataaaatcatttaacatttcagtcttatgatcaatattactttcattaaagttatacggagtacctaaggtcattaatttcttgatccgaatttcatcactataatcgtcataataattttctagccaataagtccaaatcaatcccccattagaatgtccaaaggccttaaaattattaaatttgtactgttgactaagttgcgcaaatgcttcatcaaaccaaccagcttgttttttgatattagcatagccatcatgattgttttcaaaacctacaacaataaaaggctcattatcattacggttgatttttccactatatttcagcgttccatccttttttacttgaattttcaataaactatgctttttaaaagtatctttattcagtaaattaactaattcattaaatcgttcagtcgtagcactagagcccggaatcataatgactggtgacatttgtgattttcttctttcagctaaatcatgattggcacttttgatccagaaaaaagtaggaatggacaaaactattaaaaaaataaatgttcctagtaaaagtaggcggttttttgacaccctttttttatttaacatgtttataccccgcctccttatcatttaacaaatcaatttcatcctggacatccttagacattttaatgatcggtaaatataacaaaatatccaaagcaaagagtaacatcgaaaatactaaagcttgccacgttccatttgtagcaataaatgctactaaggggcctggtgtgccagataagacattataagccgaagctggaaccaaatggactgcaatcatgctagcagctaaaagcatattcataactggcaaaattacatatggaaataaaaatagtggattaagcataataggtatacctagaaaagcaccctgattagaaccgaataatgtcggtataaagctccagcgtgccactttaacaatgctgctttttttaataaaaattaaaataccaattaataaaactaaagttaaaccgctactgccaaattttccataagattgatataaagaattaccaatataaggattaggtacattccagcttgaaccatgagttaaagcatagttcagattagcaacattagtcgcactatcgctacctgccgtcaaagatgctaaaggttgaccaattcctagccaattaagtagcagtgccaagagcaataaaggaataaatactcctaagtttaaattattctgaccttgattttggaaaaattgataaaaattagttgctactacacgcacatgcaccaaactagttaaaattccaactattaagccaattacccaagttgcaagcattggacggaaagaatcaaaggctctttgcttaatttgctgtgcgctctctgtatgccgatggtgatactcaactcctaaaagtctaaaaataagcccagtaccaaaacctattaaaagggcaaataaaaagctattaatatttaaaaaacgccaattaaaagaaagctgaaaatctctcgtgtccctaaaacgatacgcacacaaaagcaaggctaacattcctgaaactccagccatttgagcatctttttgataaagacgagcagtatactgagctgaaaaataggcggtaaacaaaccaaaagtgccaaatattacactggtaacgccttgacaggaataccatgccgcattaaataaatggtcaggcaaccatttatcaaaatagaaaatatttgatatcaaacttgtaggtgaaaaaacactctgccataaaaattggaaaatacttccgacaacggccaaaggcattagcatcatcaaagttcgatctgccactctaaaaaacgctagtctccgaagtcgaacgatagttttaaaaattattttctccatatttctctaatccttagttctttaagtctaacctttagtttaaattaaatataaaaagaaacctatcatttttcattaaaatatcgcaaaaaatacaaaattcgggaatcattgattcgatagagaacatgatataatgataaagaagataacaagggagaaaaattatggctaaacgaagtttttctattaatgatgaaactgaccgtctactcaattactacttaaatcgttccgaaaaggattgggactcagtaattaatgaagcaattaaatattatatctgcgatcatttaacacaaaagcaagttcatgaagcaataaagcacacaggaaaagatgcttttccagcagatgaagttcttcgtaattttaatagcagctggatgaacggcgatgcttaatatggattgcataaaagactatcttaggtcaaaatgaaagtagcattattaaaaagaagctgacaaacgtcagcttctttttatacgataaatcttaatttaaaaggaggaacacccatgttaaaaaagcatgcgctagaccctattaagttaatttggctatttgctggttctttaatcatcaataccggcgttagttttatttggccactaactacaatttatattcacaattatcttcatgaaacgcttactatagctggtattgtattatttattaactcagcttttacaatggtaggaaatgcactaggtggctttttatttgataagtggcatccatatcaaacgcttttaactggtgtaagcatttctacactatccacttttttattagtcctctttcatggctggccagcatatccaatcttgttaattactctaggcttagggaatgggatcgtagttactggtctaaattctatcgctactctaattaggagtcgaaatgcttcttatgtttttaatgttttatattttacacaaaacctaggactagtatttggctcgttaatggttggatttattttaccctttggtattacttatatttttctacttgcttttattatgtttgcattcttaagtatcgtggtttttcttgaatatcgcggtttaaatcaggctcatgctgcaaaaggtaaaaaagtagctgaatcagaatatcaagaaaaaattccctatggtgcaaaaaaagctattttctctatcttaatttgtgttctagcagcgtggattgcatatgagcaatggaactcaaacatttcttcctacatgttaggcttacatatgagtgtgcgtttatacagtttgctttggactttaaatgctgttttaatcgtactcattcaacctcttttaacttacttcgacgattggctaactcagcacttacacggtcgtttatatattggctttagtctgtttggactagctttcttgttgctaatcggagcaaatcactatttcagctttgtcttagctatggctgtccttacttgcggagaaattttagcctttcctgctgtctccacttttgttaatgatcgggcaagtaataaagataagggaaaatatcaaggtatcgtccaatcagttacttcagctggtcgtgctttggggccactaattggtgccttagtaattgataatttttcttacttagttttatttatcttttgtaccattctagttttaatttccgtccttctatttgcaatgattaatgcctataacaagaaaaagatcgctaaatagcgatcttttattttatctaatttcataagaaaagcctaattccaccaacatcggaatcaggctcacacagtgttaggtaccgttattctgaccaaataaaaagcgacgttttcgctaccgtagaaaacgcactttgttacaacggtacaggtaaatcttagcacagcaatcttacttacacaaccagttttagcgatgcttaaatggcaaaaaagagatggaaaacatgtttccatctctatgaagcagcctttatcaaattttccataagatcattacacatctgtcttactttaaaataatccttaaccggataattagactgaatcactaatacatcccttgtatcattagaaattcgatagtatgttgtgtaaccatctccagaaccatttgaagaatgaaaatcagggaaattgtaaaaaccagcattatacttagcaggatcagaaggagtatagactttttgtactgaagaaggtttgattatttctccatttaaaatagcactagtagcccgatacaggtctttattagacattaccaagcatcctgctcctaagtccccatgtaccttatcagctgagataaagtgcgggactaagtatccctgagagctctttgtataagggattgcaaccttaatttgcttattcttaggaatatcccaataaaactcagtttcagacagacccaattttttaatataagtatctttcacaaggccttcataagaacgatgagttactttttccaaaatgcctgataacaaaatgtaattaattgatgaatatacacgttgattatagtgccgtttatcaaaaattacattgtgcttgatgtcatacttaatccctgcttggttgtttttgaagacaggagtcccataatttgactcatcttttcctcgtaaaccagcctccatagttagaagctgctcaatcgttatttgattagcatgcggaacttgaggataaaatttcgataatttgtcactaagctttagtttctttcgctcaacctgtttcatgactaaagtaccagtaaaaactttattgactgaattaatgaaaaaagcagtcttcggcgtattacgcacttttttactgatattagcatagccagttgactcattaagaattactttattattcttaatcgccaagacgttaccaataattcctgcctgtgctagtttttttttatatctgtcgctaccttacttttagtatttggcatttttacgtcagatttattaccccaggctttagtgaagtagtaactatcaagtttgtaattaaccggatggttcttttcttccataaatggcttaacatattgatctacttttaaccaaccgttccagccaaggtgaatcgtatcttccatgaagaacttctttccaccatcttttgataaatcggcgatattgttaaagccctgagaagtaagttgtttagtaattttagcaacgcactcttgatacattgtttgagataggccggtgtacttagcccatttttcattaacaggtggaataataaacaggacattcacatgttcatgagctaactcatttaatactaattcaaagtcagcatattctggcgacttagtgtagtcaaagcttcgctgggaatcttttaacttctttaagtgcttattatttagtttcttatcaaagaaaccattagaaataccgaatttattgttcgtagtaccttgcttaccttgttcattagcgaattgacgcaaattatcatatgcgtaagtacctggtaatttaccagcttctttttgaatcttagggatattgttagtcatccctatagaagaaaagaagttatcctcattagctagcattcgacgtctagccttcaagtataaggtttgatacttagacagtttttgtcctgaagctaatgtcattaaagcatacttcgtagtttcactagcagttccagcaggcatatctaataaacgtcttgcagcatagcgcgtagcaacactatctttagcacctaaaatccagtcaacagcttgaagctgagaaaagtacatgccaaaagcagctggattttgtccctgtttagtaaaccactgcggagaaataataaatacagccttcttattagaaagttgatttactgtttcttgcatagtgaaaaagtgggttaatgattgacttcccggtcctcccaataagaaaggtcgataatttctcttatatttataagctaaaacacttgggtgcaaagcatccattcttgataattcactagagccataaaatggaacatagtttttttcaaaagcggcttgcttaattgattgtcccttaaaaacagtctgagattgtgaaactgaagctttaaataaagcattatctgacttttcaccattttgccatggaatcaaaaataagatcactagcaaaatgaaagcacaaagaactgggccaaaaatctgccacagtttgcgtttattactcatttcttaagctttctacctttgcaatgattttatttggagtgtcccaatcttcacggtgaaattctgaaactggtgcagtaacaccacatttatcttgtaattcaagtaacatttgaacagttgccatggaatctaacaaaccattttcaaaaatgttttcatccatttgatcacttaaatcttcaccagttaattcatttaaaatatctaaaacagcttgctttgtatccataattaagaaaatcctttcaaaaataataaattacttccagccaaaccataatgtactcaagaaacctgagaaaattaggaaactgaaacaaacaacattaaatgttaagaagatcgcaaaccacttagtaaacttattatgtggaatttgcttacggtgcttgcgcttaaatcttagccaaatatcgttgatgataattgccaaagcatggtaaataccatatacgatatagtaccacgttaagccatgccaaaagcccataattaagaaatctactaaatatgcgagttgcgataatctaattctattctttaccaatttatgcttcattgcaaagaatgtaaaacgcataaagataaagtcacggaaccagaaagatagagtcatatgccatctattccagaaatctttaatattttgagaaataaatggtttattaaagttcatcggagttctaattcccatgaaatatgaagtacctacagcaaataaagaatatcctgcaaagtcaaagaagagatacatactatagcagtacatataaccaagaagagcccaagataaacgtagaccaccattggcttgaccataaaatagtgcatctctagctaattgcggcaaccacaaagtaccaaagacataaccaataataaatttatacaagaaaccttggaaaatatatcttgtcccaaattttaggttttcaatatatttgtctctctctggcgccttatcatagtcttccttaaatctccgataacgatcaataggacctgaggaaatagttgggaagaagaggaggaatcttgcatacgtaattggatcaacttttttgatagttttatcgcgaagttccataataacttgcactgtcttaaaagttaaatatgaaattccgaagaatccaattaaatcagcagtcttattgtgtgctaatggtgcgatctttaccgctgctaaaggcaaaattgctaagataacggctaaacaaaaaacagaggtcttattctttccagaattaacatacttttgataagcaaaagtaattaaaaattggaaaataatatatccaatcagttggactccctgtatccagtccttaccattaaacatcaaaaacaagaatagtaatgaaacgaaagcttcataagtcttaaagcgccgaccatgatataaaccaataattaatggcaaaagcgcaataaaaagaatgacgaagtaacgcggattactatatggctgaatgttgatcacgcgttatttacctccttaattacttgtttaatatctaccttaccgttttgagaaattggcatttcatcacgatagataaagcgttgaggaagcatatatggcataatatcttgacttaaagactcacgtagctttttagtcaattcagcatcatcgtacttttctcgcactccatcagctaattcaactacagcaactagttgttgaaccttgtggtctttattgtacttaggagcaacaacgccataacgcactaatgggttcttggcgagatagaagttaatttcttctagctcaatacgatagccattgaacttaacttggaaatctattcttccgcgataaaagagcatatcgccatctaaaaatcctaaatctccagtacggtagcttgaatgctctccgtctttaaagaaagcagccttagtcttttctgggttatttaaatagccttttgaaacactaggtccctcaataataacttcgccttgatccttttcttcaccttttgaagtatcaattgagattttagtatcttctttagaaacaccaattggtaagcgatcatacttgctcaaaatatcatcagtaatttctacttgagtaacagcaacagttgtttctgtagggccgtaagtgttgaaaatatgactatctgggaatttcatcttaagcatttttgctgttttatgacttaattcttcaccgcagaataaaaaatgagttaattctgggtggtgcttcgcgtcaaaagttggatctaaaaagctcatctctacaaatgatggtgttgaaacccagacattaaattttaattgtggcaaagtcttaaataactggcctaagttctcagttacattatgaggtaacactactaacttgccacctgcagttaaagcaggatataagctcatgacagataagtcaaaagagtatggagcttgtgctaagaaactaggttgatctggaagtgaaaagtcatttaactcccaatttacaaagctcagcaagttatcatggctaatttgcacacccttaggtttaccggtagtacctgaagtaaagataatatagaagttatcatccccacttacaaatttactttgttcaatctctgcgtgattgtcagaaacttcctcaggagttaaaactttgatattatccatttcaattggaagcttatcaattgcaattaccaaaggtgattcagaaacttcctgaatcattaataaacgttcactattagaataactagcaattggaatataagcatgtcccgcttttacagcaccaagaaaactggcgatcatttcaaaggtttgaccaccccaaatcattactggggcgttttcgggaagatctaattcgctaatcttagctgcatatgcatctgagcgagctttcaagtctccataagtattagtttcgccaagataatcataggcgatccgctttggatcttcagtagcaatttgatcgattgtcttgattacatctttaatcatttaatgcgaccctttcagttctagaaatctttataaataaattttgcagccccaatgccgctatatgagtacaagtaaactagcactacaagcactgcaaagtaaaagagagttttggcaatgaataggccgatctcttttttctttgtattattttgcttatctttattttctgccatgcttacacctcgtaatcttttttctaaattttacaacattgttataaaacaggttaacatttttactatttcttagaaaaatagcatgaacagaagtaattataccaaaaatagccttagttatggatagttcactattattgattacgctttctttcaataaaataaccaattcctaagaaaatagtcggtaaaatcgaaacaaacactaacactactaagattacctttaaaagccaatcagaattttcccactttttatcattggcatttgctaaagcataggccgagaataaaacaattgtaataaggtttattaaaaacaagctgctatgcgaatattgatacagcattaaaacactacttcctgatatcaagccactccagcctgctaatcgtacccaaaaagctatcttcttaaccattttaaccccctaataaggcattgatatttgctgataaaattcgatcgacaatcataatttgatcacgtgcataagcctttgcaccagattcaaataacattaatagctgaccattttgaacataaatttgttctaaatatggcggcataactacaactttttctgcatttccttcatctagatagtttaaagctgaaattgggaaaaagtataacttagaatccttgcttccataagactgactcaaaataatccaattttgataaaaggcaattccttgaatctgtcgatccattgaggcacttccagaacctaaggcccaagatacttgaccagttactgccttaatttggtcactagtgattgttcccttaaagttccctgaacgagcaatcggataactagcaatttgtccttgaccatctgtattaaaaaagccaacaaacaattgattatcataataagttacacaagatgctctttcaatcgttggcaaagcaatgacattgtcatattgaataggttgctttttcttattataactgtatttctctagtttctttaatgaaaaagacattagggccgaagaatcatcttgactacctgttacccaaatatttttagcagttggatcataagcaataccacctaaatgcggagatccagaaacctgaatagtcttcaaatatttaccagtttttttatctaaacagtaaataactgagcgatgattatgtgttgaatcgtaagctgtaattaataagtacttccccgctacagttaatccttgaggagtcatcgaatctgtatctgtaattttctttttattgaaatcatagcttggcgttacaacttgtcctgggattacgacactgctaccaattttactagcacgtggcgtttcatatgctgcactatagacatcaggatacttttcattcaataacttcttaaagtaagccaaattatgatgacctgggctaatgcttgtgccatcctttgccttttctacatcaggtctagaagtaaacgttgcttttgcctgttctcgcttttgatattgctgatagccatagtaaccgccataactagccccagcaataattgccaaaattaagattagtttaaacagaatctttaaaaatcttttcattagctttccctacctaataaacaacttccttaattcgatattatacctgaacagtccatttactatatgaaaataaaaaattaagcaagtatattatatttggttctagtttgtactataatatattaattgtagtagtggattaataataattcactgctattagcattaacatccaactttttattttcattcttactcctccaagtagattgaataataacaagatcagcttaaaggctgattatctatctttgaaacgacttatgcacttcccagcataggtcgttttctttttagcgcattaaaaaagagaatcctgattatggattctcttttcttgtactgatgattattaaggaaatggaatgaaattaagtaagttaccgtctttagtatatctttgataggtggcatctcttaacttattccaaaccttgctttgaaaagtattcaattttaaatcattaaacgccattaaattttcaactaaactaacaacatcaaataattgtgatgttaaagcgacagcgtaatatttgcctgtttttagattagcaacggttttatttatttgttcaactatttgaacaatgttaggatcattttcagctgttaaacttaatcgaaatgcttcgagtaagctgatatattcttgatactgcatttctcaccagacaccaaattcattgattaatttgaatattatttcattcttttgcaattttttatctgttggatgcacgaacaaattccatgcttctgattgttttttagaaagacgcagtcccctaaaagcaagtgcatcattgatgtagctcattgtttttccaactcgaacagataaggttattccctcatacttcgtattctgtaaatcaaatatcgtttcatcaataacttgatataattcagcaaaatcagtaaatttgtttaaatctccatatgtctcatgctttaattgatactctaaatttttaagcaatacaattgcttctttaacttctgcttccattcgttttaccagaattaagagcttactccaaatgctccagaaaatcccaaggcattcctatcctttgcatagcttcgatatgcttgttcctttaatctattccaaaccttactctgatatgaattgaattttaagccattgaatgccatatctttatttactaaatctattacttcaaaaacttcttgtgttaaagccattgcatgatatttccctgtttttaaattagcaacagtttcatttatttgatcaactattttattaacttcaggatcattttctgccgtcaagcttaatcgaaatgcttcaagcaaactgatatattcttgatattccattttaatgacgtccaatccacccagtagttgcagtctgaacaatattgtctgcaacactttgccaattaattctacatttaccgttatttaaattctttggaccataagcataaccttttttacactctactgttgaattccaaggcattggatcataccagccgggagtagcagcagaaacggtattactgctaaagtataatgcagctcctgtcataacaggaataaatgcagtcgccaagaataatttactctttttcatgatatttacctccaagtttagaaaaaaagttttaaaagtttatttctcagaaagcgccttcatctaattaaattttatcataccaattataaatatcaatgaaatttttaaatatatatttcaatattatttacacttatataaaggatttatacattaaggagatcgctttaatattattagtataccaattgtatattttcatcaaaaaacaattgtataaagtcagctttcataatacgattatcttacagagaataattcctaaatttatcgaaatatgcagaaggtgaaaaagatggtttctaaagatgaaattattattacaatgaccaggttaactgacctacttaatgaaacaaatccaaattcagaatttactaactttcttaaagatagtctaacaactattaaatcaagcaatggcgttgctttcaccggtcagctccaatatttcttcaatcgcgcaccagttgtaaaattttctgataatatcacttttactcctgaagaagaaaagctataccataaactcctctctctaaatgagttaggaaacaacctttggggtgcaagtttataatttatcccagcttttttaacaaatttaacttttttaataaaaaacgtcacaatttgttcacattttccctctaatatataaaccatagcaacgggtgaaaacaaaaaccccatcgctattagcattaacatccaactttttattttcattcttactcctccaagtagattgaatacatttatcagtctttgactgatcctatacttatatatctgaaatccgcgtctttcccagcgcggatttttttgtgggcttatttccaagactttcctataatagaagtgaaagggaatacaaattttagaaattaattatttaagcataggaaggattattatgttctcaccatcaattcaatccttgattgaagaaaaagcaggctcatttatcatccctgcctccagaattgcattcgtagaagatgaaaatccactctaccatgcatttttaattcttactaaaatgaaatactcaaaaattccagttttagataagaatcaaaaagtagttggtttaattagcttatcaatgattacagataagatgctaacgcctgataatatcgttatcgaacctttatcagacttgaaagtcaaagacgtaatgcaaacagactttgaaacgatcaactttgcccatactaatcttgaaacgcagctgcatcttttagttgataatccttttattccagttgtaaatgacaacaatatttttcaaggattacttacaagaagagaatggattaaggcgtttaattacgtaactcattcaattgatgacaaatatgacattactaaaaagagcgatccgagcgaaacaagctaaattgcttaaatttaatctattaagtggtatagtaataatgttttagtattacttgttaatttagttggaggtaaagctaatgagacatcaatggaaattttttacaattctcggaattggtgtcattgcagcaattttagactttctgtgtggagctcctaaaattggtacatggccaatctcaggtatcttaattgatatcttcggaatttttatggcaattacaatgctccgtgaaatgattcatacgcttgaatcaggccgctggggcgtagatatcctggcaattattgccgtggtttcaacaatgattgttggcgactactgggcagcttggatgatcttaatcatgcttaccggtggtgactcgcttgaagactacgctaccagtcaagcagacaaggaactacgttctttattacaaaactcaccaagaattgctgataagctagtcaatggaaagattgaagaagttaaagtcgacgatttaaagattggcgacacggtcttaattaagccaggtagtcaagttcctgtcgatggagaaatcattaaaggtaattctagctttgaccaatcttcattaactggtgaatcagttcccgtagataaaaaagtcggcgatgacttaatgtcagggtcaattaatggggatgcagcagtagaaatgaaagttactaaggctgctaaagattctgaatatcaatcaatcgttgccttagttaagtcttcagaagcaaaacctgctaagttcgttaagatggctgaccgctatgcagtaccatttaccattatttctttaattattggtattgcagccatgattacttctgctgtaactaatccagcattaggttggcaaggtcacttcttacgttttgcgcaagttatggttgttgcttcgccttgtccattgttaattgctgcaccagttgcaatggtttcaggcatgagttcaatgtcacgtagccacattattgtaaaatctggtactacgcttgaaaaattatctcgtaccctaacttttgcttttgataaaactggtactttaactgaaaaccaattagttattgatcaagttgttttagcaaaagatagctcaatttcaaaagaaaaattacaaggcttggcagctagcgttgaacaacaatcaagtcatgttatcgctacttcattagtaaaaagcaccgataaaaacttaattaaaccagttaccaacttgaaagaagctactgctaagggtgttagcggtgaagtagatggtaagttagttaaagttggtaaactttcttatgttgatcccgatcaagaaaaaattactgttaattcaacagctgtctttgtttcaattgacaataaatttgctggatacattactttccaagatcaaatcagaaagaatacaccagaaaccattgctcgtcttcgccgtcaaggcatcaagcaaattatgatgttaactggtgaccgtagatctgtagctgataaagtggctacagaagctggaattagagaaagcgaagttcacgctgatttacttcctgctcaaaagattcaggctattagagatgttaaacctaacctcagaccagttgccatggttggagatggtgttaacgatgcacctagtttaatggctgccgatgttggtattgctatgggtgctaaaggcgcaactgctgctagtgaaagtgctgatgcagttattatggttaacgatatttctaaagttaatgatgcggtcgcaatttctaaacatacaatgaaagttgcccacgttgatattattactgcaatttgtatcgttatcttaattgaattgattgcctttaccggtatcattccagcattctggggtgcgatcttacaagaagtagtcgacttaattactatcttgcttgctcttcttgctaaaactaagccaaccaatcctaaacaaacaggattaaaaaaataaaaaaactagtttgcaaccaagaaagtttttagctaaactaaaatttagttaaatatttttcattagtggttgggttttatttaaaactttcaagatttgcttatttgggtcaataagcgcttggaagtttttttatttaccacaaagttatagaaagctggagaagatgcactttttaggagaattaattttaattctgctggctactacattattagggcaactgttttcacgtcttaatatgccagcggttattggtcaattattatcaggaattttattaggtccagccattttagggctagttaaaccaaatgaaattatttcacttttttcagagtttggtgtaattctgttgatgttcttagctggtcttgaaagtgacttagacttactgaaaaaatattttaatctaagtttcactgttgctggaattggcgttatcttgcctgtctttttcatggggattgcaagttacttatttggaatgaacttccttgaagccctatttattggaatcgtatttgcagctactagtgtttcaatttcagttgtcgtattgcaagaagctaatcaaattcatactcgagctggtacagctattttaggcgcagctgtggttgatgatatcttagcagtaattgtattaagtttatttactacctttagccatgaaggtggtaaaagtggtttaactaataatttctttcttaatttattaattgaggtaatctatttcgtcgttgtttggattatcttcaagttcattgctccatattttatgaaactagctgaaaagattgaagttgattatgctgtagttattggctcacttgtacttgctttatcaatggcttgggcagcagattttgtaggcctaagtgcggttgtaggagccttttttggcggtcttgcaatcagacaaactccgcaatataaagaagttcaatcttcagttagcgcaatcggatattcaatttttattccagtattttttgtaaatattggtctctcaatgacatttgccagctttattaaagatatttggtttatcattgtaatgacaattttagctgtcgtgtctaagttctgggctggtaaatattcaagtgaattatttggctttactaaaaatgaaggaaacattgttggtgccggcatggtgtcacgtggtgaagtcgctttgattgttgctcaaatcggaattacgcaccatctcttcccagaagatatttactcaagtttaatcttggtaattattatcaccactgtcctctcaccatttattttgaactactacattaagcgtggcgtaaagaataactaaagcaaaaacgaattagctgtgattgtagctaattcgtttttttcatattctaatttattgaaatacttcctgttggaatatctatatctactttagtaaatttagaaagtgaataatcttgattaaccactttttgattagctatattaaacatagcccatcctccaactaatataattacaataatgccaatgctaaataatgcctttttccaattcatctaaatatagtcctttaagtcaagtatttcgtcatatcgctttaactcatcttcttcatagtggtgaattacttcaatgaaagttaaatttgcagctagcaaatattgatgaattatatcagaagtttttttatcaagagaagcgttaatttcatcgagtaataggactggtctttccattaaaattgctctagctaattcaattcgtgctaattgtccaccagataatttatccgctgcttcccccaattgataatcaaaacctttttctttaattaatccatttaagtctaatttatcgcaaacttcctctaccttttcccgggaaatgttttttcctaaggttaaattaaacaataaactatccgcaaaaataaccggtgtttggcttgcatatgagaataagtctggaaatgtaccagcttttactcttttatcatttaatctaatcgcctctgcttttccatattttccatatagtaagaactgcaataaagtcgactttcctgctccagatggtccaatgacagcaattttcttacctgacttgatgtttaagtcaatcccagtagctaattgcttaccatctctctttaagatcaaatcttctacttgtaaatcctgtaaacttacaactttactattttcttgatctgtttctttatctaaaaagtcattaaccttctcaacaatcttcttagtagtagacagtttacttctatcatctaagataaataaaattggatttataaatgaattggctaattgcacaattgcaaataaagctcctaaacttgtttgtccttttacaactaaataaattccaaatagaaatggcatcaaaaatgtaacaatattcccaacaaaattaatccatgagttcgtatcaaggtttaagagattcatattactcaatgcctgttctagcttagaaattgtttgtttatttttagcaaccgcctgattttgaccatcatacaaatgcagcgtttcaacacctgctaagaagtttttagtctgattaacatacttactattagcactagtccacttttcagaagattcttgaataggcttttgaaaaacattagaaacaatcattggaataaaagatccaactaggaatagtaatgtaagtagccaattaactgctaaagcatagcctagcgctaatactaatgaaaaaatctgcataataatttcaatttgggcattaaaacgattagtttcaagtagtttaaaatcattagttaaaaatcctaaactatcactattttcgtcttttgactcttctagcattccacctaaaatatgtgttcttaaataagtgttagtttccttaattgcactagttttcaatctgttaaatactagacttgcaattaaggtaacaactaatgctgcaatgataatagtcaaaaattgcgcaattttatcccaatttttattagtagcaatattagttagtgtttgcacaacattggccataataatattttgaaaactagcaattaagccgaagataatcattaatacgaatctaaatttatttgaatacttaaacagcatcttcttcatcccctcatcgatttaaacttgttgataagagtatatgatgagattatacttaaaaatgaatctcttgcagatctgcaagttagtttttggagaatgaaaaaatgtatggtcatgaattcaaagaattacgcttagaacaaggtattacgcaaaaagaagcttgccgcggaatctgttctgaatcaaaactatcacgctgggaaaatgatcaagtcgaggttgaatttagtacggcaatgaaattactaaatagaattcacattactagtcatgaatttatgggttggtccaaattttcaccacggccagaaatagatcctgaactttctgaagctattgaaaaagaaaatattccgtttcttaaacgagttacacaaaaacaactaactaagtatcataaaaatcataataagtttgacttatttatggctgctaatctatgtaatcaactttttatcatcgaacataaaaattacttacctcctattgaccaaaaaaagctttttgcaattttttcaaaagtcaatttatggagtcaatactatatttcagcatttggtgcatcaatttttctattcaatcctaagcaaatttatggtagttcaatgcaaatcattcgtaatattgaccgtcttaaagaagctgaaactagttttaacttagaaatcattatgggaagtttatcagatggcattttacggctgatttcacttaatgaattgtcttacgctcaaaaattagtcaaagagcttaaaaaaatcgaattaccacaatatttaatgttttttaccctaactttgacctatttgcaaaaggcaattgattacatgaaaaatagtgatgaaaaaccaatacttacattaatttcagaagttttagatttaggatgcagtgtccaagccaccacctacttagatatgtttaaatatttaaaagcgcagcgaaaaaaatacaatttttaacatagcgtctacattcattttttaagcaatcccaatatatagtcacgatcacttaataggcataataaaaaacgcagtttaaagctgcgttttttgtaactataaaatacgatcaaactatcgtagcaacaatccaaactatattcgtaactaataataccaaagctactagccctttaaataagtcttttctccttgtaacaaaatatctattaactaaatattccatactcgcaccaacaactatgttcattagtaccattaccatacgataaggaaagcttccccaccatgatgtcaaatttagcactgctagtagcgtaaaagttattgttacactgtaagaataactgattaattttacatttttcataggctattttggatctctttaaaaattgcataccagaaatatagatatgctgaaatacacatgactaaaataggaaccttaatcaacaatgaccactgcattgtcatattcataattgacacacgaatatttgttttgaaaatagcatctacaaataaaggtaaaaaggaactattcctagtaatatcttaaaaactaatactaattttttcataatattatccctttcaaaataatttatttcttgaactgtctagccactgcagtaattaccgcaagtgcgttaacacagacaagaaatatagtacccattaagatttcagtattccaaaagtctttaactgaagctgcagtgtgaacaccaaatagcatagttccaaaactataataggctgaataaatcgttatcaatattaatccgactacattgatagctattagacctaatatccatttaatgaaatgcattctaatcaccctgcacttctttcagttaattattatgatcttaataaaaagtaatggtacaaataccaagtttcaactataaacacaattactagatagccataccaatcgaaattcgtatcatggttaccaaattgagttaaacaaacaaaactagaaacaataatcccaattaagcaataagcaaatggaaaaccatatttaataatgtgctgcctaactaataggcacaaaataaaaccgataatagctaaacttaaaaagatccaaaacatagaatcacctatattctagtgatttgcgccttcaactgccttaatatcgcctttgccgtcacgttcaacaattgcaccaagggctgcagttaaacccttaacaatatcatcaagagccattgatggtgtattaggacgatttacaacttgctcaggtaagaaaggaatatgaataaatcctgccttaatgttaggaaattccttatctctcatatattgcacttgatacataatatgattacatacataagtaccagcagtatttgaaacgctagctggtaagcctgcatccctaatcgcttttgcttctgccttaattggcaattgtgtaaagtaggcagtttctccatcttcatgaattggttcaccaagtggttgataaccttcattgtctggaattcgaccatcattgatattaattgccactcgctctggggttaagccaaagcgtccgccagcttgaccaacatttaaaacataatcaggattttctttttcaattgcttctttgacaacttcagctgatttattaaagacagttggaatttccaatttaataatttcagcaccatttatttcatcaggtaatcttttaactgcttcaattgcgggattaattttatctccgccaaatggatcaaatcctgttactaaaattttcataatattatcctttcaaaattaaaatgctaaaaagtacatcaaaccaatttgaataatcaacaaaataactgcaactggtgcctgctgcttaataacgcccatctgatctttcatttctaaaagagctactggcaaggtgttaaagttagcagccattggcgttaccaacgttccgcagtatcctgatgtcattccaattgccgcaacaactactggattggctccttgagcaattacaaacggaattccaattgccgcagtaattacggcaaaggcagcaaaggcattacccatgatataagtaaagagcgccatcgcaatacagtataacgccactcctaagaaatgatttccagctggaaaaacatgactaatcatattagcagttagcttaccaacaccgcaagtggtaaagactactccaagcatagctaatagttgtggcaaaacgccaggtgcaccaacacttcgtaccattctttgtgagtctttaaagacttgcttagtcggagccttagttaaaataattgctaagatcaatgaaacaacggcaccaataccgattccaacttgaccacccagcggtgtaaactgcgcaatcaaaatagaagttaatgctaaaactatacttggtaaaaatactttagctcctaaacgcttcgcaccttcttgcgcggttttgggatctagcttaggcaagctaccaacttgaatttgcttaaacaaagctaaaattccaattactaaaaccattgctccagaaacaacagctggaatccaatctccaaaggcaaaaataattgctaaaaagaaccaaaaaacagctgttccaattctcgccttatttgtcttatcgcgcaaagtttcaattccagcgactgccatacacaaaccaatcaaggcataaaggatggcgagtaaaaagttaatcgtattttgcattttattgaccctcccatttcttcatttgacggtcaaaataaagattataagcaaagactaaaataaaagtgataatcgcaattggaatcgtattaagcacaatcccaactggatcaaccttgtagccgagcgatttcatggttgaagaaattaaaagcacaccgccggaagccacaaataagttttgagcaaagaagttaccgaagttatcaactgctgcactacgtcccttaatcaagtcaatttctgactcagttaatttcttcttatcttggtcttcagcagccgcaattaccattggagcaattaatggacgaacaaattgaacttgtccttgaagagaaatcccaaagacgcctgccaattcacgaattaacagatagatatttaaaatctttccagcagttaattttttcagttttttaattgcattaaccgcataatctcttaatccgtgagattcaactaacccgatcatcggtaaagttaggaagaacaaacttaccatgcgattatctacaaaactttttccaattacttccagcaatttgacaaaatccatccctgagaataatcctgttacaattgctgcaataactacaactgcagtcgtatcccactttaggacaaagccgaccacaattattaatattcctaacagctttaaatattccatactacccattccttaaataaaaaatagaaaaatactataaaaatattatacaaaatatagtaaaaaatgcgaaggttaacctgtccttagcattaagtaacttgcttgcccccccatctggatatacttatgttattagttaaaagggatgatcgccaatgatgaatactattaattttttctttaattcttttggtacaacaatagttattccaacaacaatttttatcattgctttatttgtaggatatgatcctaagaaaagtttactttatggactgtatgcgggaatcgggttgactggtttctcatggattatcaatcaatttactccaatagttatcaaaattgtttataagatggtcaacaacactggaattaaaagatccgtcgttgacataggctgggaagctggagcagttgccagttttggatcagccattggcttaacatttttcatatttggactattggtagaaataatcttatttgccacaagaattacaaaagtcttcatgccatccaacttatggaataactttatctttatgctctggggaacactagcattctacgttactcatgattggtggctttctttagggctttcattctttatgctcctctacaccctactttttgccgaaattcaagcagatcgctggtcaacttactataaaagcaaaaacatcactgtttgttctgcacaaaatatagttcaaacaatccccgcgattttacttgatccactttggaatcgactaggttttaatcgaactactctcacaccaactactttaaagcagaagttaggaatatttggtgagccaccaattctaggagctgccttaggactattcattagcttaattgcaaatatcaaagctctcaatcaggttagtgcttgggaacaaatctttcagtttaccattcaattatcagctgtaattactatcttccctttaattgctacagtctttaacatggcctttacccctttagctgaacaaattgataaaagtcgcaaacaaaagcagaagtccaacactgttatcgagataaatccaattcatgacaaaaagagatggtttttagcagttgacgatagtgtaggctatggtgaatcagctactattatttcaggaataattttaattccaattatgcttatcttagcttttattttacctggcaacaaaactttgccaatcgttgacttagttttgcttccatttatggttgaatctatagttgcgatcacaaacggtaacattttaaaagttatcgcaactagcattgtctggtttggtttaggactttatacagctagctggttagcgccaatctatacccatgctattgctcattatggcgtaacaattcctgctggcgttattctagtcactagctttagtttgatagctcaaccttttaatgcattaatctttactgcctttatttctcgcaatcctttttggattagcttatgtattatcatttatttaattttattatttattcttagacgatatcgttcacaaatttggatttacttaaacaagatggctgctaaaaatatccagataaggcataaatcatcttttcaaaaataaaataatttaaaactactggactacactgagagacataattctaattattagccttcgcctttcttcttttctatactaagactggatgcttgagatgaaaagaaaagaggaaaactaatgctaaacaatattcatactttttttaatgccttcggtgccacagtgattgttccggttatgatctttattattgctttatttctaaaagtaaaaccaaaaaaagcaatgatgtgtggattttatgctggagtaggtttaaccggattttcttggattattaacgaatttacacctgtagttacgaagattgtccgtcaaatggtcaataacactggcatcaaattacccgttgttgatataggctggcaggctggttctcttgctagttttggttcgccggttggccttactttttttgtatttggcttaatagcagaatttattttatttgctgttggagtaaccaaggtgttcatgccatctaatctttggaataattttggtttcatgatttgggggactcttgctttctacgtaactcataattggtggatttcactaggtttatccttttttatgcttctttacaccttactattagctgaagttcaggctgaccgttggtcaagttattataaaattgaaaataccactgtctgtgccgcacaaaacattgttcaaacagtccccgctattcttttagatcctttgtggaatttgcttggttttaataaagcgaacttaacaccagcagcttttaaagataagtttggcgtttttggcgaaccaacaacattaggtgctattttaggaatagtaattggtattttaggtaatattaaagatctaacaaccattaaggcatggggacaaattctacagtttgctgttcaactatcagctgttatgacaatctttcctttagttactaatgtattcagtaaggcttttactcctctagctaagcaaattgataaagagaggaaacaaagtaagaatcaagattctgagatagatcttattcacgataaaaagcgttggttcctagcagttgatgacggtgtaggttatggtgagtcagctacgattatttcaggaattatcttaatcccaattatggttgttattgcctttcttttaccaggaaacaaatcgcttcctgtcgttgatttaatttcactcccatttatggttgaatcaattgttgctatcactgatggtaatatcttaaaggttattgcaaacgggattgtatggtttagcttaggtttgtatgcagctagctggctaggttcaatttatactggagctatttctcagtatggtgcgacaattccggctggtattgtattagttactagctttaacttaatggctcgtcccctcaatgcgttagtttttgcagctttcatctcacaaaatcctctttggattagtctatgcatcattgtttacttggctttgttattcattttaagaaaatatcgcccacaaatttggacttacttaaacaaaatggccactaaaaatgttcacgctaatcaagaccttaaaccatcccctaaagactgaatttgttacaataagtacaaaggatctgacaaaaggacgtgaatattgatgacaaaatttagttggaaaaacgtattaattgctggtactgctgctggcgttatttctagattagttaaattaggctgggaaaatattcttcctccaagaacacccgagagaaataaaactaatcctccgcaaaaattgttggagcaaatgggcgtgcctgcaaaattaactcatgcaacttatacttattctggtgaaaaattaccatgggtcagctatttagttcactttggcttttctatttcttttgcaactgcttatgcagctttattagaaaaaaaagttaaatggctaactgtagatcaaggcgttccttttggtttagcagtttggattgcctttcacttagttatcatgccattaatgaagacggttccttctcccaaagaccaaccattagaagaacatatttcagaagcactaggtcatattgcttggatgtggactaataatgaaattgccgagatagttttgaaacaattaggtcaaagaaaaaaagagcgttaaagctctttttcttttactataaaattgacagaatattgtttagcatgtgggttaaaatcgaatatctaatatcttttgtttccacatatgtccatgccagaatcattcccataacccagtataaataaatgaatttactaaacattggatcatgaccataagcaaaaacaaagccacttgccacaattccaacccacttatttaaattgttatctgtcgggaaaaatgtattaaaaaataaagctctaaagatgaactcttcacagatcggtgctacaactactaataagacattaaacattggtgaagctacttttctaacttcatcaagttctgcttggttctgagaaatagtattgccgccaattagtctaatataagtcacttgaaaaattaccagcgcaaaaaaggcagctactgcgataataattctttttgtatcccagtgtggtttagcattaaagaaccagtcattttcttgtttaagttctcttttataaatccaatacatccagtaaatcgctgctactgttaaaacggctaaaataattgcaaataataagttcacctttttttgtgcatatcctaattgcaaaacggtataaaacacaaaagcgataataattactgctaaattccctaaaaagcgtaaaaaagtcttcattcgaacacttcccctaattgaaattacctatttcttttcattataattatttatcaaaaagacataaggacatttaatcatgcaatcacaactcatgcaatttttacatcaatttcttaattttaccatgcatcatagggtaacaatcactaccctattaatgttcatgtttttagccctatttttaatttcttggctaattgaaccacgccggttaattaacggtctaatctttactgcatttggcctcacatttttagcttgggctgccattttaattttttcacagcatagtactgttttaacttcatcgtttgcatttttagccctattaatcatgtttgggatctttttcctagttacattttcatggattttctttctttggaatgcgtactttgtttggaaatatgaaagtcactcactgccaaatcttttaacgctaattatcggactctttttagtagccttgtggactttatatcgcttaggagtctttcataaactgccaggctggcttcattccctagttgcaggtgctgccttgattgccttttatctattatttgtaatgtacaattttttactcaacctagttttatatcagattgtgccacgtcgctacaagcaagactacttaattgttttaggagcaggtctcattaatggtaaaaaggtttcacgtcttcttggttcaagaattgaccgggctattgctttttctaacaaacaatacgacaaaggccacaaacgtcctaaattgattatgtcaggtggacaaggtaaggatgaagatttatcagaagctgaagcaatgaagaactatgcagttaaacgcggctatgatccagacctaatcttgcttgaagataaatcaactaatacttatcaaaatatgatctactcaaaagcagtcgccatcaaagattatggtagtgacaagttcaaagctaaattctttaccaataattaccacctctttagagctggtctatatgcaaaaatggcacatttaaaggctaacggcatcggttctactacgagattttatttcttacccaacgctacgatccgtgagtttgctggggtctttatcatgcataagaaacgacactttgttatcattggtttaatcgcaattttatttatagtccaagcagtcttcgcccttttaggatggacaagatacttaattgcctagagaggaatttatatgctccaacttttacacttaaaaaaaacataccatgtcggcgatactgtaacgcatgcactagatgatgttactattaactttcgtaacagcgaatttgtagcaattctaggcccaagtggttccggaaaaacgacgcttttaaacgtaattggtggcttagaccattacgattctggtgatattatcattaacggtaagtccaccaagaacttttctcaaaccgactggtatgcttatcgtaataattctgttggctttatctttcagagctataacttaatttctcatctgtcgattattgaaaacgtagaattaggcatgaccctttcaggcgtaagcagcagtgaacgtcatgaaaaagctgtttctgccttagagcgcgttggtcttggtgatcacttaaaaaagcgtcctaatcaattatctggtggacagatgcaacgtgtcgctattgcccgggcaatagctaatgatccagatattcttttatgcgacgagccaactggcgctctagatactaagactagtgaaagtatcatgaagctaattaaagaattaagtcatgataagttagtcatcatggtaactcacaacccagaattgtccgaagaatatgctagtcggattgttcattttcaagatggtaaaattctcagtgattcaaatccttttgagccgaagaaagaagtaaaagatactttcaagctcaaaaagaccaaaatgtcttactggaatgctctaaaattaagttttactaacattatgactaagaaaggtagaacttttttaactgcatttgcctcaagtattggcattattggaattgcaattgttcttgccttatctcatggttttcaaaagcaaattaacgatacacaaagtaaaacgctagccaagtttccgatttctatttcacaaacagcgaccgatatgaacgctgccacaagtcgaaatgaatcagataaaaacgtcaaaaataagggctatttaattgcttcaaaacctgacaacgaaaaaaatacgcacgaaaataaaattacccagtcttacattaactatgttaaaaagattgatcctgattatgctaacaatatttctttcattcgtggcacccagctcaatcttttgactaatgataatggaaaaattaagcatgtagaattttctaacgttaacaattcaggttcagctattgctagtgcacaacttcaaggaatgaatagtgtaggtatcaatactagcgtctttcccaaaacacttgattcaaaacaaggaacatttttaaaagataattaccagattcttgctggatcatggcctaagtcaaacaatgatgtagttctcgttttaaataataaaaatcaggctaacattaacgcgcttaagaacttaggtatttcaattaaagatggtcaaaagttagatcttaataaaatcgttggtcgaacttttaaagtgatcagtaataacgactactatcaagaactacctactggaaactttgttccgcaaaaagcttctaaatctatgtatgattcaagcaacttaactttgaaagtaactgcagtcattcgtggtaaaaataatagccaaatggctcttttagataacggtattgcttacagcgatggcttgactcaagaaattattaaacaaaatgaaaactccaagattgttaaggccaaaaagaacagttcaactaatgttatgactaatcagccaataaacaaaactcaaaaagaacaattcattgcttctctaggtggctctggcatcccgagtggtattctcatttatccaaattcctttaagtcaaaagataaagtacttgattacttagacaaatataatcagggtaaatcgaaaaaagaccagattatttatactgatatgccaggtaccgtaactaaattaactgggggcttactagacggaatcaccgatgttttagttgcctttgctggaatttcattagtaacctctatgattatgatcggtattttgacttatacttctgttttagagcgtactaaagaaattggcgtgttaaaagcacttggagctagaaaacgcgacatcacgcgcgtctttgatgcagaaacattcattttaggattattctctggtattttaggtattttcattgcctatttatgtacttttccaatcaatgctgtcttatacgcaattactaatatgagtaatgtggctcagcttgatccaatgcaagctctaatcttagtaatcattagtactatcttaactatgcttggcggacatattcctgctcgaatggcagccaaaaaggatgccgcaatcgccttaagaagtgaataagataactacttacttaacagaacttcagaattgaagttctgttttttttattctaattttaagcaagctaaaatttataaacttattcttatatattattgaaaacgtcatcaagaaagtatatgcttaaggtaacagatgttatatatgtggatatagaaataggtgaatgaaaatgttatcgggtgtaacaatgttagatcttgcccgcttccaattcgcaatgactacagtattccacttcttctttgttcccttctctatcgggatgggattcattgtatcaattatggaaacactctatgtcgttaaaaaggacgaagtatataaaaagatggctcagttctggggaaaaatttatctcttgagctttgctgtcggggtagttacaggtattattcaggaattccaattcggaatgaactggtctgactactctcgttttatgggagatatttttggtgctccattagctattgaagccttacttgctttctttatggaatcaaccttcattggcttatggatgtttacttgggataagtttaaaccaggtctgcactgtgctttagtttggatttcttttattggatcaatgttaagtgcgatctggattttaacggctaacgccttcatgcaacaccctgttggctatgtcattaaaaacggtaaagcacaaatggctagcttctgggctttaattgcaaatgaacaactttgggctagtttcccacatgttgtaatcggcgcagttgtcacagcttcatttgtagtcatcggtatggctgctttcggcttacttagaaaacgcgatatcaacttccacaagaagtcaatgcgcgttgctttatggattgctctgtttgcttcaattgctgaaattggtgcaggcgattaccaaactcaagttgaaattcatgaacaaccaatgaagtttgctgcaactgaaggtgtttatgatactactggtgaccacgccccttgggatattgttgctaacttaaataccaaagaacataaaaatgaaggtgcaatttctattcctgatgtcttaactattcttacctaccacaagactagtggttctatcaaaggcatgaatcaaattaacaaagaattgcatgcaaaatatgacaagaagttcggcaaggacatgagctattatgttcctgttaagaccttgttctatagcttcagaattatggcaggttttggtgctttatttgcactactttcaattctaggtttaatttggactcgtccaaagaagaatacaattgaaaacaagcgttggttcctatggatcttaggtatttctaccttccttccatttgttgctaatacttgtggttggttcattacagaacttggtcgttttccatggactgtttacgggctcttcacaattgcagactcaatttctgcaagtacaacaaccggcgagctttggttcacgaatattatgtacttcctaatcttctcaactcttggcggagtaatgatctattactgcaaacgtcaacttgacatgggtgtagctggtgaacttgaaaggggtgcatactaatgatcgacggaattgattttttacagttgctttggttcttattaatcggcctcctattcatgatcttctacttcactgaaggttttgactatggtgtagggatggcaacaaagtttttagcaagaaatgatcaagaaaaacatctcatgatggaaactatcggacctcactgggatggaaatgaagtatggctaatcacagctggtggtgctatgtttgcttcattctccgactggtacgcaagtctatttagtggctattacattttgctattctttactttatttgctctaattatcagaggggtgtcatttgagttctctgctcatgcagaaactgaacatggttttagaatttggactagcgctctattttggggtagtttattagcaccatttttcctaacaatgatgtttggtagcttgattcaaggtgtgccaattgatgctcaaggaaatatgagcttaagtatttggaatattgttaatccactctcagttgttgctggtgttgccggcgtacttctttgcttaatccatggaattaacttcttaagattaagaattgatgatccagaattaagcgagcgtgctgctagtctaaatgaaaaactttatcttgtggcctacttaggtgaagttgtttttgccttgctagtcttcttccaaactgatttcttcaagttaagaccaatttcctcaacaattattactttaattattgttgccctaactgcttggtcagatatatctttgattaagaacaaacaagtagcagcctttgtaacaagtggcttaactttagtgggtgttgttggactcttgttcaatggacttttcccacgcgttttaatcgcaaccgattcagcacactcactcttgattaagactgctgctaactctaaattgacacttgaggtaatgacaattgttgctcttattctcttgccaattgccttggtttacattatctggtcatatgtagtctttagacgccggattaaagtaaatcaaaacgcctaatctagaacaggaataaaaatgattgataaacgacttttcaaattaccaaaagccaaaatcatgctcgcaatgcttgcaggactaatgttcttgcaagcatttgctattttaggacaaggtatttttcttgcccgagcaattgttggctcttggaaacagcaacctttttctgaaattacacaagatgtgctactttttttgattttctatttattaagacaaggtatcaactggtttcaaaaatggtacatgaaccgttacgcaaatcaaacaactacccttttgcgtcaacaactacttaataaaacttacgacggggggattgcgctagtatcaagaattggaaccgggaatttggtttctaccctgctagacggaatggatgaaatttctaactatctatctttaatttttccaaaattaattgcccttgcaattgttccttgggttattttgatttatattttcaccctaaatgctctgtcaggctggattttattattagtatttcctttgctgatcctatttatgataattctcggaacagtagctcaaagcaaggcaagtaagcaatatgctggctatgttaaattgcaaaatcattttgtcgatgccttgcgtggcttaagcactttaaaagttttgggacttgctagaagatatggcaatattgtttacaaaaacagtgaaaactatcgtaaaaaaacaatgggcgttttaagagtagctatcttgtctacttttacacttgatttctttacaaccttgtcaattgcgatgattgccatgtttcttggaattggcttaatcaacggtaatttagttctctatccttcactggttattttgatcttatcaccggaatactttttacctattcgggattttggtaacgactttcatgcgacgttaaatggtaaaaacgcacttggtcaaatctttgatattttagctttttcgactactccgcaagaagatcagttatctagtttcacgtggaacaaagatagtacttttatagctaagaatcttgcttttaactatagtcatgttgatcaaagtgagttcactgttaataaaaatgctaaaatgagcggcgtcgtaaaaaagaaatcgaagcctaaagtaaacaaacataccgctgatgaattacgtaatattaatttaagccttactggctttcaaaaagtcggcattatcggcccaactggggctggtaagacaactttaatgcgaatcttagctggttttcttaccccgcaccttaaagatgataacttcactattaatggacaaaatcttgctcaacttaatcaaaaaagttggcaaaatcaaattacttatattccgcaggatccctacatgtttgcaagcagcatcagggataatctaactttctataatccaaatgccagtcaagaagagattgacgcagctttaaaggcaactgatttagataattttgttgtcagtttaaaagatggtttaaatactccaattggtgaaaatgggcgtggtatttctggtggacaaaagcagcgaattgctttggcacgtgcatttttggcaaaagaccgcaaaattctattctttgatgaaccaactgctcaccttgatattgaaactgaatacgaattaaagcaaccaatgaaaaaactaatggaaaatcatttagtcttttttacaactcaccgtttgcactggctaaatgacatggactggtgcctagttattgaaaatggagaaatcgttgaacaaggtactcctgatgatctagcaaaaaacggaactgtatttaagaaattaactcagccactgaaagaagatctactatgatgaataaaaaattttcttggaaaaatgaacggtgggtaaagccctacctagcacaatataaatggaattttattctagcaatttttctcggcgttgtgatgttcttttgtggtggagccttgatgttttatgccggctataccatcgataaagccgctacgcgtccagaaaacattttgatgatttatgttcctatagttttaatgagagctgttggtattggacgtcctttatttagatatttagaacgtctggtatcccacaactggattttacgcgttactagttctttgagaagacgcctcttttatattgttgaaagaaatacctcggctgttggctcaagttttcaaacaggcagcattttatcactgttgactgatgatattggacacttgcaaaatctttatttaagaactattttcccggcaattttaagttacttagttggctttatcgttgtaattttattgggacttttttcctggcctctagctggagtaatcgcaattttattagttgcggaattagtattggttcccttcttttctcttttaaagcaagctgctgttcgcactaaggaaaaagaagaaaaagcgcaactttacactgaatttactgatcaagttttaggcgctggtgactggaaaatttctggtagacgggatgcttttttcaatcaaactaaagagactttaaaatctttagggcaacatgaaaagaagtctggaaaatttgattgggctagagactttggtcttgaatttatttttggcttgatggcagttgccctcctttatttcacgaaccaaactcttaccaataatcaagaagcagcaaattatgttggagcagttgtcttagcgctctttcctttatcagatgcctttattccagttggacaaggaattgaagaatggcatacatatagtgattctgtaaaacacttaaatgaattaaaagtaccagagaaccgtttacctgcccaacaatatcttgatcctgcttttgctggcactttaagagtttcaaacatttcatttacttatcctggagaagactatccaattattcaaaacttttctcttaccctaaaaagaggacaaaaagcagctttaattggtccatcaggcgctggtaaaagtactatcctgcaattaatcttaggtgatttgaagcctagccaaggaaccgtaacactggataattttaatgttctcgaacttcaaaaagagcgctcaaaattattctctgtcctaaatcaagagccgtttttatttaatacgacgatctatgaaaatttaaaaatggccaatccagacgctagtgctgatcaaatgatgcaaatcttagaaaaagtccaattagccgattttgttaattcattacctaaaaaattagataccgaagtagctgaagctggagcacgcttttctggtggtcaaaaagagcgtttagcactagcacgtgtacttttgcaagatacgccaattgtcctcttagacgagccaacagtcggtttagatccactcacagagcaaaagctcttaaatttggtatttgatgtcttaaaaaataagacagtcgtttgggtaacccaccacttacaaggtgtaaaatatatgaacgaagttctcttctttaaagatggaaaagtcacaatgcaaggagatccgcatgaactctttaaacacaatgaacacttccaccaactttatttaatggatcaaggactaatctaaaaatagaaagaagcttactatgtctgctgaagctaagcaaggctactatgaattagttgaaccacgtacgctgtttaattccattattccggtcttattagggatgatgtataccgaatataattttcaattgtttagaatttttcccacaattgaaatgtgtattgccaccattgttttgcaagtttttatgaatgtaaatgatggctattgggattataaacgtgaaaaagctgccaaaactggcgaccataaaaagaatccgattggtaaatatcaccttaatcctaaacacgttttagcttttgtttgggtattattcatcatttcagctgtttgcgctattctgattggatttcaaactaatatctatatttggattgttggaattatttgttataccattgctatttcttattcaacgggttcacacacaatttctgctggaccatttggagagattgcagcttgttttgcaatgggttttggtattttcttggtaatggtttacatcaatgtttgttctaaggttccctttaattggaactttatttatccaattattctagctgctggaatacctgaaatttgtaactttactttaatgctaggtaacaatttatgtgatcatgatgccgatattgctaatggcagacatactttagtttcatatattggaattaaaggtggactctatttatttgtccttaactatttactaggatttttcctaactggttgggcaatttggattggcgttttgccttggagcgtggctcttatcttaatttgcattcccacgatctataagaacatgcgctttctttggaaaatccaaactaaacctaaatcatttcctaaagttgttcaaaatacgcaagtcctatttattactgaagccgttgggttctttattggtttgattttaaatcttagaattagataattaaaaaaggtcgaaactttatcttagtacgaagtttcgacccttttttatttcaaattatttttattgcttccacgctgcatcaaattttgctttacctgctttaatttgattatcaacaaaatcctctagtaattcaaaaattgaagcactattttttgtatcaaagtaaaagtcatatacaagatgttgtagtataaaaatcaatttttttattttgaaattttttaaattttaaattatgcgcaaaatacgcattatacgtagcttttgtatatataaaatacggatatatccgtattttataaagaataatatttataattattcatattttgccttgaattacaattaatagtctgctatctttaaatcgttaacttcattaaatagttctggaggaaaaaatgaagataaagaaatttttgattggcgctgctatggttttactcgctgcaacaactgcagcttgctcaaacagtaaatctgcttctaaatcaagcgatggttatactcctaaagagttaaacgttcaattcgttcctagtgtccaagcttctaagcttgaagctaaggctaagccattacaaggtttacttgaaaagcaattgcacatgcctgttcacgtaactgtttcaactgacaactctgccttagttgaagcgatggcatccaagaaagttgatgttggtttcttaccacctgatgcttatgttttagcccacaagcgtggtgttgctgatgttttactacaagcacaacgttacggctacgacgaaccaagcggtaagcaaaatcacaaattaatggacagctaccgttcaatgatcgttgttaaaaaaggatctaagattaagtcttggaaagaccttaaaggtaaaactatcgcagttcaagacccaacttctacttctggctatgtcctaccaattgccgaacttcacaagaaaggtttaaatgtaccaaaggattgtaagttagttcaagttaagggacacgatcaagctgttttatcagtttataacggagacgctgacgctgcctttgtcttctcagacgctcgtccacttgctgctaaggatgcaccagctgtaatgaaggatgttgttccaatttacttcactaagtacattccaaacgatactgtttcagttagaagtggtatgtctaagtcattcaaaaagaagcttgctaaagcattcaaggatattgctaagactaagaaaggcaagaagatccttgaaaacatttaccaacactatgactatgtagattctaaagactctaacttcaatattgttcgtgaatatgaagctgaagctaaaaaagctcaaaaataagtttaatatttttaaaggccaccctgctttgacttgtaggatggcctttttctcgtttaaaattagagtagatttttaaccgaggtttttaaatgaaactaaataaaaaaatttctctattactaatagcaagtatgatctttctaagcttaagtgcttgtagcaaaaccactcatgaagaccaaacaaataaaaaattaactaatcacatcgccttaatctcagacaccaacggcattaaggataattctttaaatcaatctgcttggcaaggtgttaagaattacggtactaagaataatcttgttgaaggaaataaaggctacaattacttcgttcctaaagatcctaaagattatcaagcaaccatctcaaaagccttagacaatgatttttcaacaattattggcgttggttatacacttaggcctaatattattaaggcagctaagaataatcctaaaaagaactttgttcttatcgatactcatgcttctaagatcaaaaacttggctagtatctcttttaaaaatcaagaaggagcttatttagcaggcgttgcagctgcctacaccacaaaaagccacacagtgggacgtattttaggacaagacagtaaagaaatggattcctttaaagctggttttactcaaggtgttgcagctactagccataaacttcacaagcatattaaagtattaacccaaactgtaggtaacttttcggatgctaataaagctcatgatattgcccaggaaatgtacagcaagaaagctgatataatctttcaagctgcaggcaaaagcgggcaaggtgtctttaaggctgccaaagaggtcaatcaagccaatccggtaggacaaaaagtctgggttattggttcagatgaggatcaacccaaacttggaaattaccaggcaaaaggcggtcaaccatctaattttacccttacctctgtaatcaaaagcgcagatgtagctgttgaagatcttgctaatcaaactgctaagggtgattttcctggtggaaagaacttaaattacggtcttaaaaataaaggtatttctctagtacaaggtaatttatcttatcacacctggatcaaagttcagaaagctaagcagaaaattattgatggtaaaatcaaaataatggttgatcgctaaaaaagctgtagcatatataagttcagcacaaaaaagttacttgtggctttttttctttactcttgtttctccattagtactcatattacaaaacacactataatatagttgtatagatacaaagaaagcgtgtttaagatggctaatgaaagtaaaatagtaactctaaaaaatggttatcatgtatggactcgtaaagaaggacatggtccgattaagattttacttctgcacggtggtcccggtatggatcatgaatatcttgagcctttttccgattacattaaaatacatcctgagatagaaattatctattatgatcaattgggatcatacttttcagatcaacctaatgatccaaagctatggacaattcctcgttttatagaagaaatagaagaagttcgtaaagcatggaatctagatcaattttatttatacggtcaatcatttggcggattatttgctttagaatatgccgcttctaaatatggtaaacatgtgaaagccctaattgattcaaacatggtcgattcatatcaagattacgcaaaatatattaataagtaccgcgaatcaatggatcctgctgatgtttcatatatgaagaagcaagaagaacaacacaactataatgatcctcattatcaagaattattgatgaaactatatcaccgctgcatttgtagaatatctccatggccagatgccgtgcaaagaacttttgaccatatgaatgagcaagtttatgtcaccctacaaggaccaacggaatttaacattactggttcatgtaaaaattggacaattcgagatcgtttatccaaaattacgatgcccgctcttgtattaggaggaaaatatgacagcatgaatccagctgagattaaagctttggccgatagattacctaatggcacagctcatatatgtcctaatggaagccacttttctatcttcgatgatcaagaagattattttaatgctattactagttttatcaaaacagttgaaaataaataaaaaatacatacatttttatcattgacatggtctataccgcattctatactgaggacgtaagacttgatataaagtcaaacactttctacaataataaaaatccatattgcataaatacatgtaatatggattttttacttttataaacatatacccattattccagtcagcactattacattatatataagaagttattgacatggtctagtccactaactatactaagtatgtaagcgcttatatgtatttagtgtaaaataatgagaggataaaataatgaaaattaaacgtgcttttacatcagtaatagccggactttcaatagctgttgggtgtttggcgataaataatttgtctgccaatgctgcaactactcaaaacggtgttactaatgatcaaataaatcagtatgtaaacaacgctactctagagcaaaaagtgggacaaatgtatgtatcaagaaccccacaagatccaaaccaagttaaaaatgatgtttctaaatataaccttggtggattaattgtttatgatgctgacatgaagggacttacccaacaacaattcaaagataaaatgaagagtttccaagactctgctcaaactcctttactagttggtgttgatcaagaaggtggactagtttcaagacttactcacagtggattagtccaacaaaatggcaatcaatttgcctttccaagaaaacaatacgaagaaggtggcatgaaagaagtagttgatgatgccgaaaagaatgctactcttttacgaagcttaggtattaattggaattatgcgccagacgcagactatagtactaaaccaggaacctttatgtgggatagaacttttggacaaggatatcaacaaactgctgattacctatctaaagtagttcctgcatggcaacatgataatctcgttgcatcaacattaaagcatttccctggatatggtgatgctgctgacacacatactggatttgcagaaaacagcaaatcattagctgaacttgaaaaaaaagacatggtaccatttaaagctggtatgaaagctggcgcagattccgttatggttactcacgtcatatataataagattgatcctgaatatccagcttcactttcacctaaaattaattctttaattcgcaataattgtaactataacggcgtgatagtcactgatgctttagagatgggagctattacagatttcgctaaagaacacggtaatgcttcagtagatgttcttgctgttaaagctggaaatgatatgattatgaccacagattatgctactggtattaatgagatcgtatctgctgttaaagctggtgaaattcctgaatcacaaattaatgcatctgtcacaagaattttacaattaaagaataaattaggtcttttaaagcctgaaaacttaatgttcaggaaacctacaaataacaataatacaggtactgttattaaccctggaaatactgaccataagaaccctagcgtgatttcaggaaataattctattactattagtggcgttacttataataatgataaaaaagttgcatttattaatggtaaggtatccgatcctgcagcagaaggttctatgattatgactgctacaaatgctaatactggaaaaaagattacaactgcagttgttggtggaaaaggcgtatttgctattgaacttcctatgactaatgaagttcaaaatataaaggtaacttcagatgatgattcatatgctgcagttactactaaggtagaagctatcaaagctgacaagcctgtagttaatacagaccaaaataataagcaaaatagctctacagaaaaacaagctaataagcaaaacaattcagttaaagaagaagttaatactacttcaaatacagagaaacaagcaaacgatgctaaaaagaatactcaagtagtatctaagaacactaattctgaaaagactactgtaactaatccagtttataaatcaactataaaaactaattaccaaggtaaaaaggatattactactagtcacaattcagcaacccatgctgttgctcaaaagtcaaacaccagtgctaaagttttaccaaaaactggcactaaagaaaacattgtagcattatttggattagcaataacttccactactgcattatttggattggcacttagaaaaaagaactagtaataatacaaaatatatcaattaaccttaaaagagctgaatcaaaaaatgattcagctttttttggcactcttaaagtcacaaatatatgaagaatcagaatactaacattacatagatcttttttatattcataacttatatataaactttatagccattttatgaaatattattttatttatgcaacattcttgatgcttttgagaaatattatttcaaaagtgctataatgcatttgaaagcgatatcagaaagagagggaaatacaatgaaaatttctgttatagcaataatttttctaagtctttatgtaggcttaggtcaattagatgctctatcattaaaaacaggtctctactcaccagtatttggaggtgcagttactggtttagtactaggtgacttaaaaactggattaatcgttggtgctacactacaattggcaactttaggtgtagcaacttatggcggtgctacggttcctgactttctatccggttccgttatgggaacagcatacgcaataatttctggtcgtggtgctgcatatggtataggtctagcaattcctattggcttgctcctaactcaaatggatatcttagctcgtttagctaacacatattttcaaaatcatgctactaaagaagcagaaaaagttaattacactgcagtagaacgtgataatctttacggtattatttcttgggtattatcacgtgcaattcctgtatttattggtttaactttcggtgctactgttgttaaagctataaataattggattccaacttggttaatgaatggtttaaagacggcgggtattattctaccagctatgggtattgcaatattaatgagatatctaccattaaagagatactacccatattttattctcggttttgctttaatggcatactttgcaaaacaattctcattactcggtcttgctttagtaggtttctcccttgcagcaatctatgtaatgcaaaaacagaaaaacaataaatctgaaaaagctcaaaatatagagaaaaaagattctaactccaagaaagaaattaaagggatacaaaatcctaatgaggcaattgaagccagtcgtatagatgctgaggaggttgagttcgatgcctaaaaagaatactcaagttaaaatgaaaaatttaactaaaggtgatttagtaaacatattttggcgtaatactttaggtttacaacttggatggaactatccaagaatgcaagggttaggctatgcatatacagtaatgccagctttaaagagattatataaaaataaaaaagataaaatgaagcaagccctaaaactagaaatggaattcttcaataccacaccacaaatgtctcatttaatagtaggtgccgatgtcgccttacaagatgaattgggcatggatgataataatgaaaaagctatagcggggttaaaaacaggtttaatgggaccattcgcaggtgttggcgataccgtctttgtagcaatctataacgctattatctattcaatcactgcctacttagcactatctggtcaaccattaggacttttaattcccgtaattggatgtttagctattacttggattagatggaaattctttaacatcggattatcacaaggtcaaaaacttgcctttgcattttcagataaaatgaacatgcttactgaaggagcttcagttttaggattaacagttgtaggtggtatgattccagctcttattaattataaagttgatctaacatataaagtcggaaaagtaaccatgtcggttcaaagtatgttagataaaattatgccagcattattaccgttggctattgccctattctcatattggattcttggcaaaaagcatatgaattccaccagattaatattcgtattaattggactaggtatgattttaggaaacttacaacctatttgtaactggattggtagcattttttagaaggtgaaataaatgagtatttgtgcagcacgtgttgacgaaagaatgatacacggacaagtagcaatggtatggacaaatgtagtcggtgctaatcgtatactagtagccaatgatgatgtcgtgaaagatgatttaaaaattgaaggattaaaattagcaaaaccagctggtattaagctaagcatttgttctatacaacgtgctatagaaaatcttaaaaataataaatatggcgaagataatgtctttttgattactcgtaatattcccgatatggccaatattattaatggcggtgttgatttaaaggaatttaatgtaggtaatatttcttcaaaagacggatctcaacagattaagaaatcagttaatgtaacccctaaagatatagagatcattaaagacttaattaataaaggcataaaaatcactgctcaaatggtaccaaatgagcctgattcttccatcatgacctatattgaaaaatagaggactaaattatgcagcaaaatacagttaataaaattgtaaaagtcataaatcagtccatacaaaaaaatgatatatatggtgcttcctacagcttaattggaaaaaatgaaaatcttaaaacctatgttggatatcaggggaatgaaaatgatcatattccgctatcgtctggaatgatgtacgatttagcttccgttagtaaagtcataggaaccacgactagaatttttcagttaatagctaataatcagctatcccttgatagtaaagtcggagaatatttatctgatgtttcttatccaaaaataaaaatcaaaaatttattattacatgaaagtggtttgcaatcagattttgacaacgtccatagcatgtcaaaggtagaactaataaaaaaagttaaatgtgctccacttatatacacccctggcagtagaactgtatattccgatttaaattacatcttacttggatggattattgaaaagattgaccaaatccccctaaccgaagatctaagtatacacatctttcagccgttagatatgaataataccacttattcaccccacaatattcgattgtctcaatttatacctactgaatatcaaaaagatcgtggcggtataattcgcggacaagtgcatgattataaagcttatttattagatggggtaagtggtcatgctggtctattttcaactttagatgatttatctcaatttgctcaagtatttcttaacggtggaaaatataataatgttcaaatctttcctgaaataatgtatacattactaaaagataaggaataccgacatgatgatcgagctctcggttgggaactatgggattcaaataaaaacatgttatggcattctggttttactggaacttcaatcgctctaaatttagataataatgaaggatttatatgccttactaacaggatttacccaacacgtaaaaaaatgggctggattcaagaaagaagaaagtctctatcttatttctttaatgagaaagaagaaattaaaaaatgagtacatatattaaaaaaattacgtgcagcaaaaaaacggtcccattaaagagaccgtttattactgccttacacaaagtcacagaaattgaaggactgaaaattgttgttgaattaagcgacggtcaaacaggtaccggaactgcaactcctaatgaaaaagtcaccggcgacaccttacaaagctcgttagatattgttaatcaagttattaaacctgcattaataaaccaagacttcaaaaattggaacaaacttttaaccacacttcaaacctgcatcgttcataatactgccgcaaaagcagcaatggatattgccttatatcaattaaaggctaaagaaaacaatgaatctctagtcaacctgcttggcagtgaaaaaggcaaattaacaaccgactatacaattagtatcggttcagatgaccatatggtttctgaagctaaatccttagttaaagacggctttactgctatcaaaattaaattaggcaacaactctgtaagtcatgatattaaaaccattcaaaaaattagtaaagctgttggtcctgatatttccttacgtattgattgcaatcaagcctggaattacaaagacactttaaaagctagtcgaatctgggcacaggctaatttaaacattgattttattgagcaacctgttctaaaagacgcaatctcagatttaactttattaagcgaaaattcaccttacccaattatggctgacgaaagtgtcgcttcatatcaagatgccattaacttaatcaaacatcacgcttgtgactacatcaacattaagttaatgaaaactggtggcttatcagaggcaatcaaaatcaatgatttagcacaggcttgtggtattaaaactatggttggttgcatgattgagccggttgaaagtattgccgcagctgctgcatttgctgttgcaaataaaaatgttaaatttattgatctcgattcaatttttatggctacacaagatcccgatcttggtaagtatttagaaattaaaaataatgaaattattctaaaggactaagacaatgcaactgaccaagattcaaaaacaaatagaaaataatccttggaaaacagcaattactattcgtaaaaataatcaaacgatttttgaaaattcaaacgctaatatggtttttaaatcagcttcattaataaaattagggattgctctttatattgaagaagaaaagcctgatacaattgacaatactcttaacctatctagtgatgatattgttggaggagctggcattatcaataggctaagcattaaatcatggcagattagtgatttattagacctgatgttatctgtttctgataatacagctactaatgctttattgaattattacaacataaatactattaatgattatttacagcaaaattttcaaaacatttctttaggtagatttttaatgaaaaaaagcactaaagaaaatacttgtactgcaaattctatgatggacgtttttgaaaagctgcttgcagccaataacaaagttagtcatgtagttcttaatgccttaaagcatcaagaagtaagaaataaactagtagcttacagcaatcctaagtatgaagtcttcaataaaactggcgagttattacatgagcagcatgatatagcacgctttaaagcaaacgctgatgtgattgattgctgcgtattaaccaattatcaaagtcaaaaagattatgaaaatattttaaatatgatgcaaaagatcggaaaaatacttacacactagaaagaagtatttacaatggaaattaaaaacttaactacggagcaacgaaaccccgcgactatgcacattgattctatgtcaactatcgacatggtcaaaactattaatgaagaagatcaaaaagtcgctgtggcagtcggaactcaagacgacaaaattgcccgggcaatagatgaagcaactaagcgctatagcaaaggtggacgtttaatctatatcggcgctggaacaagtggacgtctcggcgttttagatgctgccgaattagttcctacctacggtattaaaccagaacgtgcaatcggattaattgctggtggtaaaggtgctatgtatgttgccgttgaaggtgctgaagattcacaagatctagcaaaaaaagatttaaaagatctaaaactaaataaaaacgatatcgtcttagggcttgctgcaagtggccgcactccatatgtaattggtggtcttgactatgccaaagcaaaaggtgctctaactatttccattgcctgcgttgaaaattccgaaataggtcatcacgccgatatagtcatcgaagctgttgttggtcctgaagcgattactggttcaactagaatgaaagccggaactgctcaaaagatgattttgaatatgatctctaccggtgtcatgattaagcaaggaaaagtctttgaaaatgtcatgattgatgttaaacctactaattctaagctaattgaccgtgcctgtcgcattattcaaactactactggtgtatctaaccaaaaagctagggatactcttgagaaggcaaataatgatgttggtttagcaatcgtgatgctgaaaactaattctgatcttaatcaggccaaaaacttattaaaagcagaaaacggaaatgtcgcagaagttttaaataagtagcttgctagctaaacagaaggggcttataatacctaccattgcaatatatcaatttacaatgtgaggtgaaattatgagtccttttttcttattcatttatttgatttttggtggaattttaggagggctcctctcaacaattgcaagtatggcatcccttgccacttatccagttctcctttcagttggtattccaccagtttatgcaaatactactaatgatgcagccttaatctggactggtgttgggtcaactgcagcctcacttaaagaactaaagggacactggaaacaagttagtttctattcaatttttacaattattggctcagccttaggatgtatgcttttaattcaatttcccgggaaaatatttgagaagatcgttcctttctgtattgctttttccggtttaatgattttattcagtggagaaattcatcttggtaatgaaagtgaccaccctaatcgcttggttcaagctctatcattactttgcttattgatcgctggagcttacgctggttacttcggtgctgctagtggcgttttaatgttagttatcttgaatgcaatcagtgacgacgattttctgactgttaatgctatgaaaaacattattggcgcactatcaaacttggttgcgctgatcatttacatgtttactgaaaaaatttattggaacgctgctattcccttggcaattggagcgttgattggtagttattttggaccacgtatcatgcgccatattccggttaagattattcgtttgggaattgctattttagctctcattcaagctacttactttgcttatactgcgtataaatagaaaattgataatttacggtattttattgatatgaaaataagggcactaccttcaaacggtaatgtccttattttcatatcagtgtaaatataaactgtttatattccatctttacttatctcattcgctggtgaaatatcatctaattctaaaatttgtgttcccattttagaaatttttactagttcattagcatagttatccagagaattatattgattaaatatagtttcaagaatggaagccagattacagcctgctactacttttatatttttattttcaaatgctaattttgctgctactttgtatggagtccctccaaccaaatcacaaaaaattaatgttaacttagtattaatattcttattaaactccttagctaaatcttcttcactcatcccctcagaaaaatctatatatttaaaagactcctgcggtccagctaacaactcaattgcacttcttattccagtagcatatttaccatgcccagtaatgatagtttgaatatttttcatgaaaagcctcttacataatgccaaagaacgaacatacaatacataatacaaatacaattacgattagaactattggtgaaacttgtttcttcttaagtaaccaatataaaaagaaagtaaatgcaagaggaagaatatttggaaatactttatctaaaaaatccttctgtaatgaaacagtaccaacctttaccttcaaagataaggatacatatgaactaatcaaagcaccaataaccgtaagccccattattgtcgctacacgggctataatctcagaattatcttgaataacgtcaattgcttttgtacctaatccatagccaaggtgagcaaacggtattctacataaaaatatacctaaataaactaagaagaaaattattggtcctaaaatatttccttttgttgcaaatgaagctgctatcccaccaacaattggcattaaagtaaaccaataaatagcatctcctattccggccatagggccaaaaagtccattctttaatcctcttatcgtttcacgatttacatgtttttcctctagactagtcaatagtcccattaaaattgaaactaatggcggagaggtattaataaactccagattatcggccatggtttgagataaagcttttttatcattaccaaaaatttttttccaaactggaatttgtgcccaagtccatccaccagcctgcattctttcatatgagaatgaagcctgtaaaagagatgatctaattccgagcatcgttatatcatgtttagttaactttgactcattattttctttagattccatcttcatcatctccacttcctgcactgttctttaattcattaatctgctcttgcaatttcttattcttcttatcacggaagaattctatcatagcaaatacaactccaattacagctgctggtaaaacattgctgtaattaataaaggatgcgactacaaaacctaataaaagaaatggtacatattccattctcaataaaacctttagcaacatagcaaatcctacagcaggtaatgctgctcctgctaattcaaaaccatgaattaaccatttaggcattgattgaactaatgtccgcatcggagcttgagctgcataagctgataagaatataacgacaaagaatgtaatacatactatagccatcattaaaaagtttaaatttctatatttttttaaatttgtttcagcagcagccttatctaacataggcataaaaaatgaaaatgctgagtaatacataagtaaaatatattgcattaacattgcaaagggcaatgataacgacatagcagttgtaggtgctacatttgtagtgtgcgcaatgacaaccgtcataattccacaaacggcggggttaggtggttgagttcctccagctggggttaatccagcaaatgccaattctgttaagccaccagcaataactcccattcttacatcgcctaaaattatccctgcaatagtacaagaaattataggtctaaatatataaaatacttccaaccacgaatccaatccagctataattgcaaagattcctaaaagaagtccttgtgctaaagttataggcattttatttacctcctataaactcttaaaaatcaacttgagttttatgatcaccgggaacgtcttgtatatagacatcaacgccttgatttaccatactcattaacgcttctttatctttttcatctacatatactttttttgtaacttcttctttaccaggagcaaagtgcatatttcccacgtttacttctttaataggaacaccacctttaaccaatttcaaagcatcttcaggtgtctttactacaataaatattttttgacgatctgcggctttatgtataatgtcaatagttttttgaagagtaaagaagcgaatctgcacaccagatgaatcagcagtactcttcattagcttttgttgtaaaggatcatttacagtattgtcgttagcaactaaaatcaaatttgctcctaaagtttttgtccatgttactccaacttgaccatgaactaatctgttatcaattcttgttaataaaatatggggattactcattttattttcttccttatcttttacaaaaaacacttttgaattagcaggcgttacagcagtactcatataagtaactacattattttgattcatatatgttgtagttgccttaataatcgaacttttaggtacagcaggaagaaaagcttttaatctcgttggcataacatcgacttgattttttaacgaatgccgtaatagtgccggtgataatccatatcttctaaacaaaaacggaattaattctttcccttctatatcttttgcttttattagaggaaattcttcaaatgatataaatgttgtgcgctctataactggtttacgatcacatatatatatctgaactattttatagagataatcacttacatctaaattcatcatttctcttacagcaggttcttcaccatctgctaagattgaaaattcgtgaagttctatgtaaacgtagtgaccttgttgttgtaaatgcaatcctggtgtatcaataatagctatatcttgtcttggatcaaatctatccttaacaaaacttccctgcccttgatgtttttcaatataatttctttcttctagatctgcgagagcttttcgaactgtaattcgacttacatcaaataaatcacaaagttccttttccgaaggaagtttttgaccaatcttcagtttaccggtatttatctctcgcattatttctgcagaaatttgttcgtattgccataatggttgtctattcattttttccacctgtttcctttgtcatatgacaaccacagcctgaatataacaagttgcaattatcatgtcaacgcttacaaaaaactagacttctttgataaaaagatcactctattctttattgctctaagagtttggtcgattttgtaacgcataatacaagtttgtctaatcttattataaacttatggattttaatatattttccttattattagtgaagctgttatctattatcgatataacaagtactaaataaaaatttttttcaaaaaaaccaaaaaaaagataacactcttaacttaaataagaatactatccaaataatttaaatattcatttatatcattgcaattggagcgctgattggtagttattttggaccacgtatcatgcgccacattccggttaagatcattcgtttgggaattgctgttttggctctcattcaagctgcttactttgcttatactgcgtataaatagaaaatgatttttatctaggaaaaataaatttgctttgcgtaataaacatatgggatgactcctcaaatatttaaaaagatgataaattttatgaatcttatcatacttattccgatcaagataggtcaaaacaattacaggatggcgtgacaaagattattattaattcacaagtttcagctgagggacaaagcgaagatttaaaggccctagctaaattaatgaataatgaaccagttaaattaaataagcattttgactatgcgcagagaagaatcaaagaaattaacgaagatccagaaacgagggaaaagatcatgctttacgaaacgagaatgctagaacgtgaacaggctgctggaaaagctggatatgaacaaggaatgagacatggcgttgaacaaggaaaagtggattctgctaaaattattctcgaaaatcaattgaataatggcagaactttggaacaagctacggaatttgtgaaaaaattgaagctgatttctgataaagatctcgaaaaattgatcaagatatataaataaaatcgtcaaaaaatatgtcttaaagcaaaaagattgattaatcacgttactaaaacgttggttaatcaatctttttttataaatatttccaaactatatcatcgcaagcggagtcttttcagtcggttgcggaaaatcattatctattaattttatttcatctgatgttaatttgatatcttgagcagcaatattctccctcatatgcttaaccgttcctgccttaggaatcgataaaacattaccatttctcattgtccacgctagcataatttggtgcggagttacattgtgcgcacgagctactattttaagattattagtaatcctaatcgaatcgcctttacctgagttaaatggagaatacccaataaaactgacgctatgcttttcttgccaaggtaaaacatcgtactctaccccgcgttcagaaagattatacaggtcttcattagcaaaacaatccttgccacctggaacactaaacagttcttctaagtcagctacatcaaagttagatacaccccaatggcgaattaagccttccttttgtaattcttttaatccacgtactgtctcagataaacgcttatcgccacgccaatgaagcagatacaagtctaaataatcagttcctagtcgttttaaactcttttctaagctctgacgctctaattctggagaagcatgatatggataaaattttgagatcaaaaaaatttgactgcgatcatagcctttgattgcttcaccaattaatttttcactttttccttcaccatacatttctgcagtgtcaattaccttaattccattatctaaaccatagcgaagcgccgctaattcgtcttttttcttagaagcgtcttcgccaattccccaagttcccatgcctaaacctgacaagttattttcttgaaaactcttctccatctcttctcacctcatctaaattttaccgcagaaaaaaacaaatttaaaaatgttagcggtttaagttgactagaccaattttatattttataatggactagaccaatgaatgaggaggtacacataattatgaaaatcatcgtaactaaagataatattgaaggcggcactaaggcatttgaaattattaaaaagggaatggaaaacggcgacaaagttttaggccttgcaactggttcttccccaattccaatgtatgacgatatgtgcgacagcgacttagacttctctgacatgacaagtattaacttagatgaatactacggcttaaaaccagataatgatcaaagctatcactacttcatgcaaaaacacttattcgataagaagcctttcaagcattcatatattccaaatggaatggcaaaagatattgacgaagaagttgaccgttataacgacattattgctgctaacccaattgacatccaaattttaggtattggtagaaacggacacattgcctttaacgaaccaggtactccatttggcagcttaactcacaaggttcaattaactgaaagtactattaaggcaaattcacgcttctttgacaatgaagacgaagttcctcgccaagctatttgtatgggaattaagtcaattatgcaaagtaagaagattgttttactagcctttggcgaatcaaagcaagatgcagttaaagcattagttgaaggtccagttactgaagaagttcctgcatctattttgcaagatcacccagatgtaacagttatttgtgacgaagtagctgcagcaaaacttgatccaaaatacagaaaataatcctcatttaagactatttactttgacgaattaatcttttagattagttcgtcttttctttttgcacttttttgatgtgttctcttgacttttttcttttatagcaaattaaaaaactacttgttttcataccagatattgaattacactattaaagcaaactatatcttgtagaaagaacgtgatgacagttattgtattgagcgggcctattggagccggaaaatccagtttaaccagtcttcttgcagagcatctaggcacccaagcattttatgaaggtgtagataataatccaattttgccactttattataaagacatggcacattacacctttcttttaaatacttatcttctaaaccaccgtttggctcaaattaaccaagctattcgcgatcataacagtgtgtctgatcgttcaatttatgaagatgccttatttttcaaaatgaatgttgacagtggaatcgcagatccgactgaattcaagatctacgatagtttacttgagaatatgatggaacaagctccaggcaacccaagtaagaaacctgatttgttaatttatattcatgtatctcttgataccatgcttcaccgcattcaaaagcgcggtcgtacatttgaacaattatcaactgatccaggcttaaaagactactatgctcgacttttatcttattacgagccttggtatgaaaaatataatgcatcccctaagatgatgattgacggcgataaatatgactttgttgcagatgaagaggcacgaaaagaagttatcagcacaattgatcaaaagcttactgatctaggtaatctaaactagctaacgaatagaaggaacgtgatgacagttattgtattaagtgggcccattggagccggaaaatccagtctaacaggtattctatctaagtatttgggtactaatcccttttacgaaagcgtagatgataatcctgttttgccattattctatgaaaatcctaagaagtacgcatttttattgcaagtttatttcttgaatactcgcttccaaagtatcaagtcagcattaactgatgataataacgtactcgatcgttctatctacgaagatgcacttttctttcaaatgaacgccgatattggccgtgctactaaagaagaagtagatacttattacgaacttctacacaatatgatgagtgagttagatcggatgcctaagaagaatccagatcttcttgttcatattgatgtatcatacgatacaatgcttaaacgtattcaaaagcgtggtcgtaactatgagcaattaagttatgacccaactctagaagactactacaagcgtttgcttcgctattataagccttggtatgaaaagtatgattattcaccaaagatgactattgatggtgataaattcgacttcatggcaagtgaagaagatcgtcaagaagtcttgaaccaaattgttgctaagctcaaagaaatgggcaagcttgacgaagattggaaaccaaatttagttaaataaagcaaaaactgcgatccatactggaccgcagtttttcatatattcacaccattaaactaatgtcttgaagcgccgcttactgcatctgccgcttcacctgttagttgattttctttagtaacaggatatggcttcatcacactcttactcgttgaagaaattccccaatcagcagtgtaatcaagatgatcaatttttgcatgtttaatatcttcaattgtcttacaaccagttaattgcatatcaattaacaattccttattcaattgatcaataactgactgaacgccttgagcaccgccaagtgctaagccgtataagaagggacgaccgataccgactaagtcagcgcctaatgctaatgccttaaagacatgtgatccgcgacgaacgccaccatcaaggataatcggaacagggtgatcacaactcttcacagcctttgcaatttcaggcaaaacgtcaattgtagcaggagcgccatcaacttcacgtcctccgtggttagaaactacgattccgtctgcacctgcaccaattgcaagcatagcatcttcagcgcattcaacacctttaacaattacaggtacatctgcaatttccttaatcttgcgaatatcatctggcccaatattttgagcagatgaagcgtacatttgagcaacgctttgtccctctccttttccaccagtccattcattaaagaaagcaagtggaacaggataagtaaagttagtccgtaaattggcttcacggtagccactaactagtgcatctacagttaagaagaaaccagtaaaaccggctttaactgattcttcaatcaccatcttattgaagtcccagttcttgcttaaatataattgcataaagcgaggcgagtcaccgactgcgctttgcacatcttgaacactcttattcgcataagtactcatcccaaataaagcgccagcagcctttgcacccttagctgtatcaacttctgcttctgcatttgcaataccatgacaggcaattggacaaatcatgaccggtgtctttaactccatccctaaaaattcagtatttagtttcggatcctgcatcccagttaaagcacgaggcacaatttgaaaatggttaaatgcttgggtattattccgccaagtccattcattttcagcaccactagctatgtagtaataggctgcttctggtattacgtactttgcttcgttttctagttcatccaagttaaccatgtgtagcttttcttctctagtactttgtggaaagcccttatagtaagttgtcattgatatttcctccaatcattaagtaggtttctatacaccttaattttaggacgatttcatcaatttattaaataaaagctattatgaaataattcactaagtccgacatacttactatttatgtctttcatagcgctttctttaattaaaattcgtgtttacatttatttatcagaatgctacactgtaaaagttgcttatttaaagctaaaaacgaacattatgtctggaggacaaaatgaattttatcaaaaactactttcatttagaaaagttgggaactaatgttagaactgaatttattgcaggtctaacaacctttattagtatgtcttatattcttttcgttaacccaagtgttcttggcgctagtgggatgaatactggcgctgtatttaccgcaactgctttagccgctgctcttggtacagcaattatgggtattgtagctaactatccaattggtgaagcacctgccttaggtatcaacgctttctttgcctacactgtatgtattgggatgaaggtatcttgggaaactgctttagccagtgttttcgttgcatcaattatctttattttaattaccttgtttaagctaagagaaaagatcattgattctattccttcagaccttaaatttgccatttcatcaggtattggtctttttattgccttcctaggtctacaaaatggtggcctaattgtggctaataaatcaactttagttggtttaggatcacttcataatccactcgtttggattacaatttttggtttaatcgttactgtaattttaatgatcttaggcgttccaggtgcaattttcatcggaatgattgctgcatcaatctttggcatttgtactggtcaaattgctgtaccacataagttcatttctttagcaccaagtcttgcacctacctttggtcaagccgttttccacgttaaagacattaattctctccaaatgtgggttgttgttttaactttcttacttgttacattctttgatactgctggtaccttaattggtcttgctcaacaagctggctttatgaagaacaacaaaatgccacgtgttggtaaagcattagccgctgattcaactgctatgatgtttggttctatctttggtacttcacctgttggagctttcgttgaatcaagtgctggtattgcagttggcggtcgctcaggtttaactgctgtctttgttgccatcttcttcttaatctcaatgatctttagcccactacttggcgtcttcactactcaagtaactgctcctgctttaatcattgttggggttttaatggcacaaaatactgctcatattcattggaataagctagaaattgccgttcctgccttcttgattttacttggtatgccacttacctactcaatttctgatggtttggcattaggaatgattacttacccaatttgtatggtttctgcaaaacgtggtaaagaagtcagtccaatgatgtgggtactgtttgtagtattcatcatcttcttgtgggttttgaattttaagtaggataaaatttactaacgaaaataccgattatcatccatcttgataatcggtatttttgttgcttttattatctgtaaagtatacttaacaaaaagcgcgatttttataaagtatactttacagcatctataattaagtcgttcatagtataatataagtataaaagtaatccttattttccccactcaactgtttaatttttgcaaatacagaacaggaggaataaaaatgatcattacgggtaaaactatttttaagatagtctatatacttagcataatattcagcattacttacatcgtttggaacactcttcagcataatccattagatccaacttaccttttggttgccgtcatcagtatcgtagcaatgactttagtttttataaaaatcaacaaagaataataatttcatatcataaaaaaggcccgtacattcgcacgagctttttaattaccagttataatctgccaacaaaagtttcactattcaaactttgaatgcaatctttactaaattgattaatctttttgcttggtacttttttgttagctttgtcaacctacatcgaccaccacaaaaaataaaaacgccgctcaatattataactttggaagagttattgagtagcgttcaccgtaaaaaataatcttaaccaccgctcttaaagcgggctgtataaggagatccccgcatcgccttttttcatatctaattatatagtaatgaatgtcattttgatatttctttaatctctacaaatttctaagcaatataatttctttccacattttggacaagttaattttctaaacttaggtgtgtgcggagaaaaattaaaagttaaaaatgacggaataaagacatctccgcaatttgggcaaacatattcaacttgttcatagtaataccttgataatccccaagctgttgcaaaaactattgcaattaaagctacgacttcaattactaatattgtcgtcatcttcatctgatataaataaactgcagtcccaattcctgctatctcaaatagcgttaggagtccaccccataccaagagtctgcttctcaaagctgtcaaattcttttcttttctcataatatttgtaatgtcagaaatattggttaaagtagcaggtaaaaaattaattttttgtagattctctatttgtttttgacgcttgtttaattcattaattttttgtttattttttcgatactgctgctctaaaagcaaatcaagcgattgcccaccacgctcatcttgaatgagcaactttatctgctttaatgaaaagccaagttcttttagataaataattaattctatctgccttatctgttctttttcataaaaacgatagccattttcttcaatataagctggcttaacaagtcctttttcatcatagaatcttagagtacgcgtacttacttccagcatcgcagctacttcaccaattgaatatttttcttgcattactttcacctcctagcttcaagatatcaattaacgcaaggtcaaagtcaatatttaaattataaaatattatatttcccaggtaataatgttcggattctacaaaaaatatatcatttcttaattcattagtatctttttttgtaatttaatcgaataattttgactatcatccttgaaatagttaatattttagatataattttagttgaagattcgtttttgaatggctaaagagttaatttagttgtttaaaattttattttctttcaaaatacgaacattaccacatctggagggttacatgaattcaattggtaaatttttccatttaaatgaaaaccacacttcatttaaaacagagtttttagctggactaactacgtttgtgagtatgtcttacattctgtttgttaacccagctgttttaggagcaagtggcatgaacaagggagcgttgtttactgcaacagccttatctgctgctttcacgtgtattgtaatgggactagttgccaattaccctattgcttctgcaccaaccttaggacttaacgcattctttacttacaccgtctgcttaggaatgcacgttaaatggcaaactgctttagctgctgtttttgttgcttcgattcttttcatcttactaactgtatttaaagtacgtgagatgattatcgatgctattcctagtgatattaaatacgcaatctcagctggtattggtttatttattgcctttattggtcttcaaggtggtaaattaattagcaagagtgattccactttagttactgttggtgctttgaacaatccacttgtttggatcacaatttttggtttagttgttactattttcttaatgatcgccagagtccctggtgccatctttatcggaatgatcgtggctgctgtctttggcatcgccatcggtcaaattccaatgcctaaggcctttatttcaggagttccaagtctttcaccaatttttggtcaagctgttttccatattagtgatattaatactgtccaaatgtggatcgttgtcttcactttcttactggttactttctttgatactactggtactttaatcggacttgttcaacaagcaggcctcatgaaagacaacaaaatgccacgcgctggtgaagctctagcagctgactcatctggtatgttagttggttctgttcttggtacttcacctgttggtgcctttgttgaatcaagtgctggtatcgcagttggtggtagaactggtctaactgctgtctgggttggtattttcttcttaatttcaactatcttcagcccaatcttaagtgtctttactactcaagtaactgctcctgctttaattattgttggggtattaatggctgaaaacttagcacacgttcactggactgaccttgaaattgcaattccatgtttcttaatcgcacttggcatgcctcttacctactcaatttcagatggtcttggctggggcttaattatttacccagtatcaatgcttgctgctaagagattcaaagaaatcacgccaatgatgtggattttattctttgtcttcgtcatttacttcgtagttctaaatgtgaaatagggttaggataatgaaaaagctagttagagacaaaatacctgaattcgctacctatgcatcttatcgtcaactaaaacctgatgaaagagaagatgccttgaaaaataaaatcgtcgaagaagctaatgaggttaaagctgcacccgacgatcaaaatctccttgaagaattagctgatgtttatacagtgttagaagcatttttagattttaaaaatattagtaaagaggaattactaaaacaagtagaggcaaaaaaagctgaaaaaggcggctttaccaaattccttttgatgaatactgataaataatatctccttaaacaagtagttcacatgactacttgttttttatttatctccatttgcgtatacgataaatttctgctagaatacttaacaatcaagttatctatatatcgtcgaaataaggtcgacagtatctaccctgagccataaattcaggactataggtatcagacgtcataaatttgctttaaaggacatcttttacccatggcttttttgggtaaactgtgtccttttttcatttttattttatgttggagaaatgatgcaatttttagataaagtctttcatttagaggatgcacatactaatgtcaaacgcgaattaatcgctgctcttaccacgtttgtttcattgtcatacatcctttttgttaaccctaatattttaagtgcagctggtattaataaaggcgctgctttcactgttactgcaatcgcaactgcaattggttgtttcttaatgggattcattgctaactacccaattgccttagcaccaactcttggtagtgcagcctttttctcatataacgtagttattggaatgcatatcaattggcaaaccgctttagctagtgtgttagttgcttcaatcttgtttattttaattactgttttaaaattacgtgaaaaagttgttgatgctattcctcaggacttaaaatatgcaatctctgctggtattggcctattcattgcttttattggcttacaaaatggtaaattaatcgttgataataaatcttctctagttggtttaggatcattcaataatccagctgtttggattactttatttggcttaattttaactgtcatcttaatggctgctaaagttcctggttcaatcttcatcggtatgatcgtgactgctatctttggaatggtaattggtcaaattccaatgccacatggtattgtttcaggtgctccaagtattgcgcctacttttggtcaagcagtctttcatttaaaggacattaacacgccacaactatttatggttgttttaacattcttattagttactttctttgatactgctggtactttaattgggatgacgcaacaagccgggatggttgacaaaaacggtaaaattccacgtattggtaaagccttcttgtcagattcacttgctatggttgaaggttctgttcttggtactgctccacttggtacttctgttgaatcaagtgcaggtatcgcaatgggtggtagaactggtttaactgctatttttgttggtattttattcttagtttcaatgattttcagtcctcttctagcagtaatcccaactactgtgactgccccagctttaattatcgttggggtactaatggcaggaaaccttaaatatattcactgggataacttcgaaattgcctttccatcattcttggttgttgttggtatgccattaacttactcaatttctgatggtttagccttagggatgattgcttacccaattacgatgattgcttctaagcgctacaaagaagtatcaccaatgatgtacattctatttgtaatattcgttatcttcttccttattacaaatatgggataaaaataaaaatgagatcgtacgcgatctcattttttattacctcggcaataatttactagctttagatcattatttattccataatgttagatatatttactagtgcgccaagctagtcaatcgaggagtatttggaataatgtcagttaaacctatcattcatgatgaactttctttaaaattcaaatctacgctagtcaccaagcaggatctagcagcagctgaagatttgaaagacaccttaattgctaataatggcaaagctgctggacttgcagcaaatatgatcggtgtacaaaagcgaattattgctttatttgttggtccacttccaattgtgatgcttaatccaattattgttaaaaaagctgataagtatttagcttatgagggatgtctttctttagaaggagaacgtccgacagaaagatataagaaaattacagtgaaataccaaaatgaaaactttgaaactcgtcagcaagcattttctgatttcgtcgctgaagtaattcaacatgaagttgatcattgtaatggaattttgatttaaactatgtattttcaaaaaaggtagcacctcgactaaaaatcgaagatgctacctttttcttctataattcacgatttgttggtccacgttcaatcttaattctaacaattaaatgaactaagttatatagcagagtaaatgctagtaaaatcaaccaaaaataccaaaatgcataaataattaacaaaatagctggaaaaacacttaaaataactgcaattagactatcagctagtttcaattttttattaaaaattccacttctcactaattgatatgacttaaaacctaaatatcctgcaccagttagtccaaatattcttaatagcacgtcaacattcacaaagacacataccatgcttaatcccatatacaaaacgccaatgacaatcaatataattcgtactgatctagtaatagcatggctttcttctaatccttgctctatatcaacaagataataaataatcgcgcataaaccgactaatcgatacaaccagccaatattccaaaatgccaaaaagaacataacgcaacttaaaataacttcggccacaccaagaagacggtttagttttctgttcttaacaattaagtctggccgcatacaatcattcccatctgatcctataattcacgatttgtcccatcgtgttcaaccttaattctgacaattaagtgtaataagttatatgccaacgcaaagatcaaaagaaatagccagagaatatctcttggagctaatgcaactactaatgacgccactactattcccaaaaaaattgctatcatgctatcggcaaacttcagattcttattcttcaagtctttacgtaagaccgcattagttttaaagcccaaatatccagcactgacaattccaaatgccactaataaaaaatctaaattaacaaagacaaaaataatactcataagctcgtaaattgtaccaagaacaataaaaataattttttgcgtgcgactaattaccttactatcttctagcatttgttccacatcaatccagaaataaagaataaccgccaccacaataaaaatgagtagccagccgatgttttttacagtaaaaaagaccatcataactacaatcagcaaactgataaatccaaaatacttatcttgcttttttctttttgctaattcaatccatcttttatcgtccatctactcaccttcccgttttagttgtctagattttactatgaaatatttgctttaacaatattttaatcatatttttatacaaattgtgtagttttcattgttgacaagtgtaaacataaagatatatgattacagttgtaaacgaaaggaaagtaaaaatgaacgaaaagaatttatctcctatttcagacagtgaatgggaagtaatgcgtattgtctggacattaggtgaaactcacacaaatcaaatcctaaaagaacttcaagcaaaaaagaattggtcagactctactatcaaaacactaattagacgtttagttcagaaaggctggttaactgccaagcacgaaggacgacgttatacctacactgctactgttagtcagacagatatgatgtacaacgaagctaaatccttattaaaccgaatgtgtgacatgcataagggcgaagtgatcttaaaacttttagaggactcacctatttctaaaggcgatttaatgaagatgcaagaagaaattagtcaaaaagaaaaaacagcaccggacatggttccatgcaactgcttaaaaaccggctctactatttgctaggaggacttaaaaatgaatactagtcaaatcatcgtcttaattatcggaataattttaattggctttattgtttggtggttctttggcaaacataaggaagctacaggaagtggaactattgttaatgacgaacaaactgcgacaattgtagttaacggtggatactctccttcaacagtagttctaaagaaagggatacctgcacaagttaattttgatatgcgcgattctactgcctgtttatcccacgttgtctttgaacaattaggcgttaataaagatctaactaaacaaaaaatcactactgtcaatattccaactgacaaaactggtacttataactttgcctgcggaatggacatgtttcatggaaaagtaattgttaaataaagaaaggaactactaaaatgagtattttttcaaaaaaacaaactaaaaaagttgttgttaatgcagaaaatcacggctacaaaccagatgtaattacttttaaatcaggtaaacccgcacaagttaagttcattccttctgataacatgggctgtatgaacgagattgtcttcaaagatcttggtattgacaaggttcttgacggtaaaaacgaagtagttgttaacatcccaactgataagccaggtacttacaattttgcctgcggaatggatatgttccatggaaaggtcgttgttaaataatgaaactatcaaatattaagcgtttttggatatcattcatcctatctattccaatgcttattcaaatgttcgccatgccttttcattggatgatgccaggatataactggattgcgcttattacgactacgatcattatggcgatttctgccctaccttattggaaaagtgcaattgctgctttcaaaaagcacagtgctaatatgaacaccctagttgctacaggtacagcagttgcttacttctatagtatctttgcgatgattaccaaccgtccagtttactttgaaagtgcagcctttgttactgtctttgtcctacttggtgatgcgatggaagaaaagatgcacgataacgcatcaaacgctctaggtaaattgatgggcttgcaagcaaaagatgccgaagttcaaagagatggtaagttcgttaaacttccacttgatcaagttaaagttggcgacattatccgcgttaagccaggtgaaaagattccagttgatggcgaaatcttagaaggtgttacaacgcttgatgaatcaatggttaccggcgaaagtatgccagttgtcaaaaaagttggtgacaccgttgtaggttccactattaatagtaacggcacaattactttcaaagccactaaggtgggctccgacacaatgctcgctcaaattgttgacttagttaaaaaagcgcaaactagtcacgctccaattcaaaatttaacagataagatatccaatatctttgttccagctgtaatgattatcgctattttaacttttattatctggtattcatttttaggtgcgactgctgtagaagccatgctatttgccgttagcgttatcgtcattgcctgcccatgtgctttaggtttagccacaccaaccgcattaatggtcggaactgctcgcagcgccaaaatgggcgtcttaatcaaaaacggtgaagtattacaagaagttagcgacttagatacagttgtatttgataaaactggtactatcacagtcggtaagccagaggtgactgacgttgtaggtgatcaaaagcaagttctaactattgctgctagcctagaagagtcctcggagcaccctcttgctacagcaattgtcaaaaaagctgaaactgaaaaattagcaattgaaaaagttgatgattttgaagcaattgaaggtaaaggcgttaaggctaactacaatggtcaaactgcttttgttggtagtgatcgcttactggcagatgttgatatttcccaggaaatgtcacaaaaaggtactgccttacaaaatgaagctaaaacggtagtctatgttggcttagacgggaaaattattggcttagttgctattcaagatgtaccaaagccaagttcacatgaagctattaaagagctaagagagcgtggtttaaagaccatcatgcttacaggagacaataagaatgtcgctgaagctattgctaaacaagtaggtattgaccaagtcattgctggagttttacctaatgaaaaagcaatgcacattcaagaactccaagaacaaggtaagaaagttgcttttgtaggtgacggaattaatgatgctccagcactttcaactgctgatgttggaatcgctatgggatcaggaactgacattgccattgactctggtggtatcgtcttagttcaaaatgacctacgtggtgttgttcgcgcacttgatatttctaagaagacatttaacagaattaagttgaacctcttctgggctctaatttacaatacaattggtattccaattgcagcaggattatttgttggcttaggatttactcttagtcctgaattagctggtttagctatggcattttcatccgtttctgtagttggtagttcattgatgcttaataaaacaaaaattgctggtgatacagctaaagcatagttagataaccaaaacggcctagtatcaatttagatactgggccgttttttagtctattgttctttatatttatccaaaaattttatcatctctttaccaaaagctgacatcccaccccattcaaaactttttagaatcaatttacacttctttaaatgtcttgcctttctatcagtgtgataagcaattagttcttcataaaaagtaagcatttcacgataaagaaaaaattcagggataaccttaatttgctggcctagactgataagcttatttgtttcattatattttttctcttcaattccctgctttaatacattcagtataatcgcaaataaaatttcgtcttgcctttcgacttttttcttttttaatgctttaacaatctgtctaattatttgctgattactatcaaaatcatataaatctacaaaattcgcatagactgataatttataagtatcatattctggcattaagaatatcttttcttttagctgatttcttaaattaatgtcaaaagtttcaggatcgtctttttctgattctaaaacaccatcaattatcagcagcatatctttcttcatatcagcttcgacatctaatttaacagcttttgccttaatttttttaatttgagctaatgaattatctgcataattagctttagttatttcctcaaaaatggcattaactttatttacctgctcttgatgtggatctatttctagtttttcaaaaaaagtcttaactgaaatggcattatgcgttagaagcaataacaaatcatcagcagtaattcgatgaatattcttttcaactttagaatagtaagactgactaacaattccagccgaaaactctttctgatttttattttgttttacgcgatattctttaagcaattcaccaacagtcattttggcacctcaaaataattcgaatacgactattctagaaataattttactttcttgatattatgaaagcaacattaaatttaaaggggtaatcagttatgaacagatttaaaattcgtggcggacttggtgattctgccgtagcaaaccctgacgttaaattacaagataacttatacttagctactaattcaaactggcttgaacatgcagaaattccagctgaccgtcccatgattggtggcttcacagagttagacatcaaggttaaaaagcaattgtcacaagattttgataactttgcttctaacgacaaatcacttcctaagattgcaaatctagataaagctgttcggctttatcaacttgcactggactttaagcaaagaaatgcggacggcgctcaacctatccaaacagacttacaaaagcttacttctctaaagaacttttcagattttgataaacatactgttgatctagttaagtctgcacttgcttttccttttaatcttagcgttgatgttgatatgaaaaatacaactaagaatgctctctactttagttcgccagaaacattcttacctgatgctggcaactacaaagattcttctgctgatcaattactaactatttttgaaaaacaatcagtgcaacttttaaaactagctggctttaatgaaaacgaaagtaaaaaatacgccgctaatgctattaaattcgataaactcttagccaaatataaaaaatcacaagaagaattaaacgatattgctggtatttataatccttactcaatttccgactttaaagcagcttttactaacatgaatattgatcaattgcttaatgggctacttcctaattcacctgaaaaggtaattataactgaacctaaattcttgcagcacattaatgaactattaagtcctgataaatttgaggaactgaagagttggcttgtagttaccttcattaatcattatgctacttatctttctcaagaatttcgtgaagcggcctttgcttacgatcatgcagtatatggagcaaaagaattgcaaagccaagcccagcatgcttatgggattgctaataatatactaggcgaagtcattggtctctactatggtcaaacttactttggaccagaagccaaagcagacgtggaacaaatgataagaaaaattcttgcaacttacaaagcaagactccagactaacgactggcttacgtcttctacacaaaagcaagctctaaaaaagctcgatgcaattacgttaaaaattggttatccagataaacttagcgacctatatgatcaaattcaagtatcatcagaaaaatctttatatgaaaacattatcgctgctaatcaaacccaactcgtccataattttagccaattaaacaaacccgttgatcgaactctttggggagcagatcttccagcaaatgagattaatgcaggttataatccaacaaataatgatattactttccctgcaggaatcttgcaaaagcctttttatagtctagataataccctaagtgaaaacttaggtggtattggagctgttatcggtcatgaaattacgcatgctttcgatccaaatggttctaaatttgatgaagtcggcaatattcgtaattggtggagtgacgaggattatgttaagtttaatgaactgtccaaatctgaaatcactttatttgatggtattgtctgtggcggaattaaaacaaatggtaatctaactgttggtgaaaatgtagctgacttaggtggccttacagctgcagtagaaactgccaaaaaagaaaatggtaatttgcaagaagtatttcaaagctgggctaaaatctggcgtggtaaaatgacgccccaagttagaaaaacgctcattgcctatgacccacatgcaccacgagagcttaggacaaatgttactgcccaatctattgatgacttttatacagcttttgatattacgcctggcgatggcatgtggcttgatcctgaaaaacgagtacatatttggtaattaaaagttttcatcataaagtaagtttttgcaagaagtctgataaatttactttacgaggtaaaaatatgaaacctgagttaattaacagaccgcaatatttaaacaaactaattgattttattgctacaaaagattggttactaaattaaaaacgcaaaaaagactgaatctagagatatcaaaatctcgattcagtcttttttagttagtctaatttttcacccattgcttgttcacgtttagcttcacgttttctaagccatggtaaaacgaatcctaatccaaacaatactacaacagtaataatgttcatccataattggtgagtaaaggccttagtgcctactgcaacgttttgagggataaatcctaaagtagcacagacaaaggtaaatagtaagcaccaaccaccaacagttaaagcaccagccttatttttaataaagacatagtctgagtggtacttatcttggtgcattctcattgctacaaaagcaaagaatacccaacaagtcttatatggtgaaataattccgttaacgttcaatagccagttatagatggtattaatgttaggcaacgttcctgttaagagtaataagaacaagctaagtccaacagtaaatgtgtacgagtgaattggacgtccattcttgtttttcttagtaagccatttaggcatgaacttagaaccaacatcccctgcaaatacacgacttgatgcatcaagtaacactgcaagttgagccatcatgaagattgcttgcacaaccgcaaagatgtacattaacaccttacctacacctaagctttcaccaagtaattggaaagcgtagtaaggtccattcatcttgaagtcatgtggaatatggtgagcgttaaagaacattgctaaagccaaggttccaaaaatcgttaagaaaccagtcataatagcaagcatccacattgcttttggaaaatctctcttaggattcttcatttgttgtacgtaaggtgcagcaagttcagcaccagacattgcaaagatcaaaagaccagtagttgagaagtaattcaaactgaatgaaggcttaaatgctccccagttaaatggttgagttgcaatatggtgtccatgcattactgaccatgcagcaagcaatacaaagagcattgacataatgaacattgctcccccaccaattaaagaaagaatttctagtgaattacgaagtttgttttctaataaaataaagatcaaaatgatcacaaaagttaagattccgaaccaaaaggtcgacatcttcttgtctaagctgttgttgccaaaaatcatccagctaaatgaaacaataactgagtttgatacatcaacgatatatggcacactctgcacccaatacatccaagaggtccagtatcctaaggtatcgtttgtacttcttctgacccaagaagcaagtccaccgtcttgattatcaaaagtcaaactcatctgactactaatcaatgcgtaaggaataacgtaagtaaataaaagaaagatccaagaaattacaactgaaagtccttggttttgaaatggatagaagatattttcaaaactaataatcgttacaaagtcaatcagcgcaataacaggccaactcatatagtgctttttattcggttctaaatcatttaagacatctggtttatccaattttcaatttcctccaaaattaaaatatttatctaaatccaacgttttaaatttggaggcttcaaaactatcattaaagtattcaaaatcacttgtagaaatcctctataaatcgctataatttatgccgtagtcttcttgcaaataaaattgcgtacaaaaacgttcgcacaaaattataaggatttataaaaattttgcaagtctattttagaaaatatagtaggaaaacaaggtgattaaatgaattttctaaaaattgcactaagcaatggacttaaaaataataattttaattcatggcaaactactaatttgaataataaacctcaagctagtgaacttgccgctattgttttagcagagggcgaccaagatagtcttaaaactgctcaagatctacaaaaaacttctggccttggaattcctattattgaagtttcacatgaaacaatttctaataatgaaaaaagaaaaataattaacgcagcaaataaatacaccaaaaaaatggtcccaggctttttaactgatttagttaattttgctgaagatcatccagtaagctttactactcctggtcaccacaatggcctctactatgaaaaacaccccgctggcgttgtcttcaatcgcttctttggtaagaacctgatgtttgcagatactagtgacaccgtacctgaactaggcgacactatgacgcacgaagggacacctttaactgctgaacaaaaggctgctgaaacttatcacgctgacaaagtttacttttgtactaatggaactactagtgctaactcaatttgtgctagtgccttactgacgaaagatgatctagttctctttgatcgtaacaatcataaatcactttataacagcgccttagttatgagtggagctaaaccagtgtacattccaactgatcgaaatgcacttggtttaattggagaaatggatcctaattttttaagtgaagaaaaaattagagcagaagttgctaaagttgaccctaaaaaagcgaaagctaagcggccatttagattagctattattcagtcagaaacttatgacggccttttctatgacgctaaatggatgatcgataagattggtaagctttgcgactatattctatttgactgtgcttggggcggatttgaacaattcgtaccaattatgaatcatttatctccccttaatttagatttgggcccagaagacctaggtatcttagtaacccaatcactccataagcaacaagcggggatgggacaagcttcccaaattctaaaaaaagatgctcacatcaaaggccaaaaacgctatgttgatcataagcactttaatcatgcttatcttaaatttgtcacttcaagctattcatatcctctttatgcttccttaacagttaactcatacttaacaagtggcgaaggcaataaaaaatggtgggataaaatattacgactaggaattgaatggcgtaaggaactgattagaaagtcaaaattatttagaccactcgtaattgataattttgaaaatattagtactgacgacttagcaacaaatgaaaaatactgggacttagaacctaacaatctttggcatggctttagtaaaattgcgactggtcaagcaatgattgatccactaaaaattacagtagtcactcctggcattgatgttaaaagcgcaaaatatgaagacataggaatccctggtccagtagtggcagagtttctaatggaaaagagaattattcgtgcaaaagatgatttgtactccctcctcttcctgcttacacctggcgataccaaagctgaattagatacactactgaatgcatttttagagtttgaacaatactataacgaagatgcaccattagaaaaagtattacctaaactgactaaagtatatggcgatcgctacaagggttatactttaaagcagctttgccaagaaatgcataattattaccggggaaataaaactttcactttgcagcaagagctatttgctaaaccaaatatgcaaaattacccaatgacaccagaacatgctgactatctctttatgaaaaatgaaagtgagctagttaacctagatgatgttaaaggaagaattgcggccgaaggtgcacttccctatccaccaggtgtctttatcgttgccccaggggaaaaatggagcgatattgatcaaaagtactttgaagttttagtaggagcaatcgagcgcttccctggctttgtacctgaaattcagggcgtttactgggatcaaaaagcagatggtaaaataagagtacaagcagaagtattaaaggagaattaactaatggttttatcttggaaagaaaacttaccaacagaattaaaagaaaaagtcgataaagtcgacaaaataattgaacctcgtttagaagaaattgacgaacaagttttttataatcagcaacgcgttttagacctatttagaaaacaccgcgtaggagaagaagatctagttccttcaactggctatggttatgatgatgttggtcgtgacaagcttgaagcaatgtatgccgactactttaaaacaaacgacgctttagtccgtccacaattttcttcagcaacacatgcgattgctgttggtcttttcagtatgcttcgccctggtgatactctttactacttaactggtatgccatatgacacaattcaagaagttattggtttagcaggcaacaaaccaggaaacatgaaagagtggggcattgactttaagcatactgacttacttgacaatggcgaagtagactatgatcaagccagaaaagacttacaagatccaaagattaaagtcgtaacgatccaacgttctcttggttatgctgtacgtgcaagtttcaccatggaaaaaatcaagaaaatgcttaagttcatcaaagaagttcgtccagatgtaaagatcttcgttgataattgctatggtgaattttctgaaaccgaagagccaactttctacggtgccgatatgatggcaggatctctatttaagaatgctggtgctggtattgttaaagcaggtgctttcttagttggtaaaaaagacctaattgaaggagcaggttctcgtcttaatgttccaggtgctggtaaaggagaaggcgctacttggggctatctaagagacatgtaccaaggcttctttatggcaccccacactactggtgaagctttaaaaggtatgatttatactgccgctctttgcgaagaaatggggatgaaagttgcgcctaagtggaatgatccaagaactgatattgttcaaacagtaacctttggagaacctgatccaatggttaaattctgtgctgcaattcaacattactcaccaatgaactcatttgttgatcctattccataccaccaagatggttatgaagatgatgttgttatggcttcaggtagctttactgaaggttctacaattgaattatcttcagatggccctcttcgtgcaccttaccgtctatatattcaaggtggtttgtcttacgctcatgataagatcgcaatcactcatgcagtggaagagactttctacaaaaaagattaatattaatcaacatatctaaaacggccagtgatttttcactgaccgtttttattttcctgataaacttatttcaaaatcattttttctttcgtttcttctacaaatccgcgactactgtatagtccttttgctctgatatttgtaggaaaaacttctaaaaatgctggacgttttaagtaaggaatggctgtatctaatagttttcctcctataccctttccttgatattcttttaacacgtaaatatagcctagttcattcttcctaaaagcaataaatcctactacatgactattaacttcagctacatagatcgtttctgaaaatagttcttctttatatattgcctcttcaagcggagcatacagttcaacagcgtttccaacaattaattcctgcatcctcgcttcatcatgtacttcacataattgaacatagtctgtatttttatattttctgataattacttcttctgacataactaacctaatttctatttgaaacatcaggagaaataaactcctgattaacgactaaattggctagcttctgtacgtaatctcatttccttaccagctttctaaatttttaataatattaacgtatgcttaaatttgtgtcaatatctaagcaaaaattaatttatctttgcatcaattaaaaatctttgttagggtggaatatatactttaaatttttaaggaggattttttcgagttaatctagatgatttaactcatgttatgcgaaaagaaaggcagaataatacaaagaatatcaaagaaaaaaagaattataaaaaggcacctctcatgcctattcacttacgagtatttatggccgtcgtattaggtcaaatcgcttgtggttttgctttaggcatttctggtacagctctttctaatgctagtaaatatattacaattaatgatctctggactggattaattggagctggatctttaataggactagctggaagtattctaattggtcgcttatcagataagattggtagacgaaagttattaatgctcaatatgtatattttaggtattttatctctaatgcaattactgactaataatctacccactcttttcatcatcagagtattaattggattaatgattgccgtcgattatactgttggaaatgcacttttaactgagtggcttcctaaaggagaagacagcaaaaagcaaagccacttgcttatctattggacaattggatttattgcctcatatctaacaggtacttttattaatggctttggctcacatacttggcaaatcattttagctacgggagctattccagcatttattgccgctattttcagatctatttttcccctacctgcttcaccaagctggcttgcaagccacggtaaagtcaaaacagctaataaagttatcaaaaagcatatggggcgtaaatggggaattcccaagagacttaaaaaggctaaaccagtcaaagaggtttcctggacaatattattttccgggaaatatttacgtcgcactctagtcggtggactcttttacgcttgtcaagcttttgctttctttggtattagtattttccttccaattctcttgcagagtatgcaacttactgatcaaaaaatttcaggtattatctataatggcggtatgctcattggggttattcttggaatcctacttttcaatagaattagtcgacgcgcattccttatcagtaattttttgctttcaggtattctaattggatttttggctattaccaaaaaccttaattcaaatatccaactcactatcttttgtatcttcgcgattattttatcttctggtctagtacttgattacccatatccaactgaactattcgatattaaggttcgtggaaccggcgttggaacttgtattactatcagcagatttggtgccgcagcaggtacctttttactgccaattttgactaatcaaggcggtgcaagcttatcaatgctaatctgcgcaattgttattttggctgcctttatcatctgcctaatttgggcacctgaaacctcaccaaaatttaagcaaaataattgattctattctacttttttctaaaataaaaatagaaagagtcaggagggattactatggtaaaaatgacaattagccaagacgcaattaactttctaagaaatcgtggttatgataaacatgaaataattttgattgttgatggtggtggcggtgattattcaattgaaggtgggtcctgcaatattggcatggattactctctaatttcactagatacaatgaaacatgattcacgctattcagtaaaaatagaaaataatgctgactttgaaatttatacctccgattatgatttagcttttttaggtgataacttagttctagatatccacgatactaccttgcgccttcgtaacgattctggcatcttaactggtgctgttaagattgctaaggcaagctttcttgccgagcaagctaaaaaaggtattataaatcaaaaaaattgttaattaatagttctactctcaaatataaatttgagagtttttatttaccttaatttataatgcttttttcgtaaaaatgttatatcattaaaatcaataatttagaaaaggacatattgccatatgatgctaattgtattttagtctcaagggactaatttactttcccttgagaaaaaaattaaaatcaattttcttaaggagaaaaaacaaaattgaataatactgacgaaatcgaattttcacgtgtacgtaaacttgtctctcactatgctgtttcacccgaagcaaaagacaaaattctagttcagccacttgccactaaattagttaaagcaactgctttacttgatgagactgcagaaatggtctggattttaaatcatggattacacataccctttattagttcagatgccttgaccccaattttaaataaggtcaaaaaaggttttatcttaaatccagcagaattagaacaagtagcagacttcgttagagttacgcgtctattagtacgcttttttaacaagcaaagaaataatactccaattattgcaagttattgcgatactttaactattctagacgcactagaaagcgaaatttataatgctatcgaacgcggacaagtttctgataatgcagacaaagatctcgctaagttaagacaaagaagcaataaattaagcacgaatattcaagatacgctgcaaaaatatttgcaaagtaaaaaatatcaaactatgatgcaagattatcagataattcaaaaagacaatcattataccctcccgattaaagcaagttttaaacatacttttggtgggagtattattgatcattctaataatggaaatacagtttttatagaacccactaaaatcgtgcatcttacccaagaaaaagcaactgttgaaaatcagatttatttaattgaagctcaaattttaggtgatttatcagcaaaaatttaccaggaattatctcagctagaggcaaatcttaatattattattgacctagattgtatcttagctcgagcaaaatactctcaaaatattaatggcaaacgaccattgttaaatgaacaaaatcaactccaattaaacgaaatgagacaccctcttttatctaatccggttcctctttcacttaatttagattctactaagcgaggtttaataatcacaggccctaatgcaggcggaaagactgtcactctaaaaacagctggtttggccattgcaatggcagaatttggactattcttaccaagttcagggatttgctcaattccagtaatgactgctatatatacttcaattggcgatcatcaggacctggataactctctgtctacattctctgctgaaatgaaacaaatgtcttacattgtccagcatgcaacaaaatatagtctaattttattagatgaattaggcagcggtacagatccaaacgaaggtgctgcccttgctattgctctgctgcaagcattacagctaaaaggcagtttaatcttagcaaccactcactatagtgcaataaaagactattctactaagcattccgcttttatcactgcagctatggactttgatctaaagacacttgagccaacatataagttactgttaaatcaaataggaaccagccgtgctctatggatagctgaaaagaatgggatgcctcaagaggttttaacgcaagccaataatttcttaaatactggtaaatttcctttaaatcaaagcaaaattaaatttgcaaataatcagaaaaaaatcaaatcgacagtttcttttaaaaaaggtgatcgtcttaaagttccggagtacgaacaagatgttttattctatcaaaactcggatcttgcaaatcaaatcattatctttgttaataaaacttttaagacaataccagttaagggagctaagctagttagaaaggcaaaagatctttatccagaaggttacaatcttgatctattattcatacaagattggaaagaatataaattaaacagagatttaaatcgtggctctaaaaaagcctggaaaaaattaaaaaaatagacaaacttagataatgatataaacccagaaattcggacaagaatttctgggttttatttaccggctccttttactttgcaattgtgataatttttttatcgacttgaattttattttccttagccaattcttttaacttacgacttaaagtttctggcgtaatgcccaaataaccagctaggtcttttttcttaagatctagctttactttatttgtaccttgtttttttgacaaatcattcaaatacgccataattctttgcttagcatccattgaattgcgacgcactgtatttttttccgcagtgactaatttttgaccaaaatcattgagtagacttaaggctagatccggcgtttgacgaactaatttttgaaaatcattccgtgtcattgagcatacccaagcatcagtagttgcctgaataaaattctcacgagcgctagtcgaaaataaatgttcttggccttcagaatcgcccttattcagcaagcctaaaatcgtctctttaccatcttcattaagactataaactttagcctttcccttatccatgacaagcatcccgtcttttccatcaaagggttggcgaatcaaactgcctttaggaaaatattcttgatgcgtcgaaatggtaactagcttttttctaagtgattctggtaaatccttaaataaagtggcattactcaaacaagcaagtggcgaatgttttgtcatttttcatacttctttcttgatataaatcaattttattatatcctatctttttataattaacttgtaagcactgataaatgaatttttaagcttttcgatttatgatagagctgaagtgttacttaaaagaaaggatctttattatggcaaaatatatcgctcacattaacccattaaatgcagaaaaaattggttgtcagccccatgggacagccgaatttatcgaaaatggcgatcaacttcacattaaagtagaaatgtttgatacaccaaagaatatcgaacactgggaacatttccacggctttcctgatggtaaagtcgctcaggctgcaactatgactcaagatgtcaaccacgacggctttgtcgatttacctgaaactgaaccagtatcaggaactacgatggtgccacttgatgcggatcctgccaaaatgaatattcctaacaatacttaccctgtcgctgacagcaatggttattacgaatatgaaattgatgtgcctttgaccgaattacaataaaacttcaaaaaagctttcggcagcaccgatcttcaattagataaacgcgtagtttatgtccacggagttcctgagagcattaaattgccggacactgttaagggctgtgtaatggattatgatactcacactaccttgccaattgccgcaggcaagattgaaaaagaagactaattagataatttaaattaattgaatatttattctaaaaagctgttactaataatagctttttatttttatgtgtttcattgagaaagtattaattttgtcgatacattcaagtacgtagttgtgatctgatactaataatactatcaaacagatgcaagtttgcacgatcctaatgtatcgtcaccatctgtttaataagcatataaaaacgggtcattagtaaaaatgacccgttttttggttgtatattaaagttaattaacccttgataacaataattactacatcttctggtttcatgatttggtcccccttttgtttaatctttatgctactaattatatttagctacagtaattaaattgtaattagtcatatttgactcaaaaattatctttaatgaattttctgagttcattgctgtattctttcatgcctgcatcttgtagggttttaataaaattcttgcacttatttatttttttcgcatcattactatttttaatttcaattatatttttgaaaaactcaatatctattttataaaaaagcaattgtggcgtagtttttatattttgaatcttattaagaaagtaagagacgttttcaaatttatcattttcaatagaaaaaataagaatattgcatactatggctaaaataagttcttggatattagagtcattggtggattgatactgttttaaaatgtttcgcgtaattatttcattatctgataaactataaaatcgcataaagtcgcagtaaagcattagcttatcttgagtataagatggaatgtcaaaaattttatttttaatagtcgatgttagcttttcactatttagttttggattcattaatgctaaaaatccattagtcattaatgtttgatagtttttattatattcgcttaaagtactttcgtgaataattttcttaatattatgcatctgctctatattattagtgtaataagcttcaatcatcatattttctaattcttttgtttggcggtatgaattatcgcttttttgactaaagctattaaaaaattcctgtacagaaatattgttatattgaagcaagcctattaaattatccgctgtaacttgacttatattcttttctacttttgaataataagactgcgtaacaattgaaccaataaattttctttggctcttgttttgttttaaacgatattctttcaaaagactgccaatcatcatatttatccctctttgcaatgagtcatatatgacttattttactatatatatcgctaatttgctaagctcaacctaattaaacgaggtgaatatgaatgaatatatttttaactaataaaaattatcgtagattttcaattgctagttttctttctagcgcaggtgatattcttttctacttggcatttatgacttatgcaagtaaattaaaaaactattctttagcactttcattaattgccatttcagagtctttacctaaattatttacaatttttggcggttactttgcagataaaacgcaacataaatttaaaaatatatttttaagcgccattattcgttgtgttttatatggcatcgttggactgctatttatcagtaatgtcaatcaatggagtttagtaattattgttgtaacaattaatttgatttcagatacatttggagcttattccagcggattagtttcaccattagtcgttgatctagtaggaaaagatcatttcggagaagcagagggctttactaatggggttaatgaagttattaatatagcagcacagtttataggttcagcattgctgctaattatgtcatactcatcccttgcgtttttgaatgctgtttcatttttacttgctggaattttgtttgcgagtgtgggactgagacaaaaatctattgcgtcgcttaaaagccatgaaattaatactcaatcttttttggtaacaatgaaggcgtctttcaagcaagttaaaaagcagactggccttttagaggttgtcctgattgttgcagttttgaatggatcgctaagttcaatgggatcattaattccaattatgatagcggctcataaaacagcaatggtaatttcaagatatagttttacgattgctttgatgggtgtagtagtagcttgcggagctgctttgggaagtatgtttggtacgcagttgtttaagaaattcacaattttttctatgacaattctagccactttaatcgctttaatgaccacttttgcgatttttgcaactagtatctatcttgttttaggattgtattttttattagcattaacagccagcgcaacttcaatcaaattgacacaatggctagtaacgtccgtcgagcataagattttagcttctactgtcggtctattaaacactattttgattgcgtctgctcccttgatgactactattttaacaactgtttcaggtgcaaccaatataagatatgcccttattttgcttgtagctttagaagtaattacttttttggtagaacttaaagtaagtcataaagtaaaagtagcctcaatcatatcttctgtaaaggagtgaaatatttatctataccgccttttatgtctcaacagttcaagagattagaacagtcactttgcatgatttttcataatttgttgcgatgttgcaagttttgatgaaaatggacataaatgggccttgaatcattttaaaacttgcctaggtgcgactatactttaattacaaaaaaataagccctctagcttaaatttgagctagagggctattttgtatatttaagctatccatctaattcgacaccttgcaattttttaattgcatcatagacttgtccgcgtcgattttgatcaacagctagcactaataaatcgccagctgcaatcacagtgtctccgtgaggaataatatcttgactgccgcgatgaataactttaattaaggtatcatccggccatttaacatcttctatcttttcatcgactaatttactgctttcatagactgggattgaaatttgatcttcttcgccgcacaatcccttttcaccagattttggctccatagcagccgctaagctatcataaattggacggccgccaagtaattggtcaactaacaaagcaataaatgctacaacagctaacggcattaaatgtaacagcgatccgaccatttcagtaattaaaataatcgctgtaaatggtgctcgaataattgctgcaaaataaccagccatggcaaaaataattaaattaataactaatttttgtggcaataatcccagctgcaccataaatagaccgtaagttgcgccaattaaagcacccattgttaaaattggtaaaaagatgccgctcggcagacccgaatcataagaaacaattgaaaatgcaattctaattacataaaaaatcgccagcatccctactaaattccaactgctataagcaattgacttaggcaaagacaaaatcaaatgattacctggtccagtaattagtggcaaataatacataatcggcattaagatcactagtgggattaatccgtgtagccagcgcggaataaaagtgatttttgcataaaacttttttaaattaaacaagcccaatttatataagtgtcctaaaagccccaaaataagtcctaataacactaaatgccaataaagtggcattgggaaggaatgattgtaagctaaagctaaagctggtttttgaccaaataagttagatacaacaaagttcgaggcaatcgcacccaccaaggcattcatccacacacgtggcgaaaaattatgaaaaatttcctctaaaacaaacaacgcaccacttaaaggggcaccaaaagcagctgataaaccactggcagcacctgttgctagcaaaactcgtgaatttgttttagtttgcttaaagccttggccgactccttgaccaattgtggaacctaattgaagcgatggtccttctggtcctaaaaacaagcctgttccaataaccataatgccgccgattaactttcgccacaaaatcggccaccattgcaaagttaattttccttgcatttgtaatttaacttccggaataccagacccaccaacgtgcggatattgtttaacaaaatatcctgcaattatgccagttaatgccagtcctgctacgattacaataaaccataatggattttggtgcgacttcttaaataaatcgagccaaaaagcttcggttttaccaattccatatctaaaaaatcccactacaactccagcaattaatcccacgcataatgcttgcagcattaatttgagattgcttttttccccgtatctcatactttcccgctttctgattgatataaatattattttaccgcaaaaagccactactttcgtagtggctttttagtttcatgtgaaacattattatttttcttcataccattcagtatggaaagtacctggacgatcgtttctttggtaagtgtgagcaccaaagtaatcacgttgcccttgaataatattttgaggtaaacgtgggttaaagattgattctaagtagtttaaagctgcactaagagttggtgttggtacgccagcatcagcagcaattttaacaacttctcttaaagcactaatattttctttctttaccttatcgaaaaatggagccttgaacaagtttggtaagtctttatcagcattgtaagcaaacttaatatcatgaagcatttgtgaacgaataatgcagccggcttcccaattttgagcaatagttgagtagtgtaaacgccaattataagcctttgcagccattgttaattgctcaaatccttgtccatatgaaacggccattgctaaatataaagctttagcaagttgatcaactaaatcttttggagccttttctggatcaatctttggttcaggatcatctctcaaagttgctttcgacataaagcgtgcaagaacagcttctgcaatcacagtaattggagcgccaagacgaattgcatcttccagcatccagttaccagttcccttgtaagaagcttcgtttaaaatatgatcaataatgtggtcatcagttaaattatctttctgctttaaaactttagcagtaatttcaattaaataagcttgtagagcacccttatcccaatttttgaaaatttcactcatttcatcatttgagtaatggcctacggtacgtaaaacatcgtatacttcagaaataatctgcataataccatattcaataccgttgtgaaccatctttacatagtgtccacttcctgctggcccaatgtagccaacacatggttgaccagttggcgtcttagcagccatagcttcaagaattggtgatacttcttcataagccttttcatcgccacctggcattaaagctgggccatttaaggcaccttcttcaccaccagatacacccattccgataaagtgaataccatgtttttccatttcttcataacgacgattagtatcatgaaaattagaattaccaccatcaatcacaatatcgcccttatctaaaagaggcaataatttttgtaaagtttcatcaactggttttccagccataatttgaactaagattttacgtggcttttctagtgaattaacaaattcttcccaagtataagtcggctttaaatctttatcttcatattttgctaaagcatcgacctctggtttatcaatcgaaaatccagagacagagtatccatgatttttaacgtttaaggcaaggtttttacccataacggacaagccaataaccccaaattgttgcatatttttgcctccacatatttaataaaattcttcatctactagtatacttttttattgcaaatttcgcacaattttgcttactttttatcaaaaaaataaagagttcaactatgtgaactctttatttaattatttcctaggaaattaatgacgtgatgcgcctgatgaagcatcttcttctgcttcgactggttctgcctcagtatgttcagaagcccctgatgcggcatctgcttcaacaccatacttgccagcaaagtaactaaatggtttcaaagcttgggcatcgtacttagcaacgaatgctggatcatctaaggtattcaactcagttgaatatggcatatcatgagtgatcttgcagtcgattagaactggaccttccattttttgagcagctgttactgcatcttcaaattctttcttattgcgaacagtaaagccctttacattcataccttcagcactcattgcccaatcgttatcaggtagctttacacctgataatggttggtgtgattcatcaacttgttcagcttcaatgtatcctaaagtctcattagtaaagaccacgttaattacatgcatattgtaacgtgcttgagtcaaaagctcttggttcatcatagcaaaaccaccatctccggctaggttccaaacttcacggtttggataaatagttgctgcagcaagagaagctggagcaccataacccatagttgcatagagacctgaagtagtccatttttgatcaccatgcaagtgcattagacgatcaaaattaatgtttacgttaccgacatctactgcaaatactgcatcgtcagctgctttcttgttgataacatcaaaaattggttcaactcgcattggaatttcatctgaatcattgaaactttcaagccaagcctcccagttttcacgatcagcaagagctgctttatacaatggagattctgaacgactttcacctgcttcaattaaggcacgtaaagtcttcttagcatcagctaacattggaacagttactgcatgacgtttacctaatctctcagaattaatatcaatttgaattacttttgccttagggttaaagaagaatactgagaatggtgaattattaccaacccaaacaactaaatcagcatgagtttgaatatcgttacttggcttagcaccaacacgaccaattgaacccatatatgctggaaattcatcttcaacaattccttttcctagaactgatgaaactagtggcatcttgaatttatcagaaaattctttcagttccgcactagcatcttcagcaccatgaccaaagtaaacaattggattttcagcatttttaattaattcaagcgccttatcaacctgttccttacgaggtgctgggaagttaggtacaactttatgtgctgcagcattgttgcggaagttatcttcgatcttatcccaaccaaagtccttaggtaagattaaaactgctggaccttttctttgataagcttgacgaattgcttcatccatcaaaaccggaattgattcagctgtttttgcttggtgattccaaacagcaacaggatcaaaccatggcttttcatcaaaagcttggaagaagtcaatatcttgacgacttgttggaacgttagcaacaatcgcaaccattggagtcttatcatattttgcatcataaagtccattcattaggtgaactgcacctggaccagcagagccaaagcaaactccaactttcccactaatcttatattcagcagaagctgctaaagcaccagcttcttcatgtcttacttcaataaactttatcttatttctccagttatgaattgcattcattgttgagtcaaatgaaccacctggaaaaccgtatatatggtcaattccccagtcatacaaaacttggaacattgcatctgaaccactaattttcgtcatagtctataagcatctccttaatgatttttcttacaccttgattaaaacacatttattaactaattgaaagcgtttgccataactgatatatcaatatttagagcatactcaaaaataattatttcacaaactatttacctttctgcttaacttatcggtaaaacacaattttaaagtgtgattaagtgatcatgctcaacaaaaaaagcaaaaaaactttttaaaatttttttgccttaattcaattattatttatttctttatcttagcaattctgccttgttgaatgtaagcagtcaaaattgctaaatcagccggattaaccccagatattctttcagcttgcgcaatagattcaggacgaattttttcgaacttttgacgtgcttcagtcgctaagcttggaattgcattatagtcgatatctaccggtattttctttgactctaatcgatgtaaacgatcaaccaaagtcttttcttttttaatatagccttcatatttcaatgctatttccacttgctctttgacataacgatcagtagctaaggtttgaccacttaatttttcaacggcatcgaacgtaacgcgaggacgtttcaaaaaatctgccccactaactcctgcattcaaacggtcctgcttgacgctagccaaatattcttgtacttcatcagttggatgaattgtaacttttttaatagctgccattgcccgggaaatagcctgctttttagcttcaaattttgcataacgctcttctgaaatcaagcctaattcatgacccttttcagtcaaacgtaaatcggcattatcatgacgaagaagaagacgatattctgctctacttgtaagtagacgatatggttcattagttcccttagttactaaatcatcgatcaaaacaccaatataagcttcatctctttgcaaagtaaagccaggcttattttgagcactcaaagcggcattgattccagcaattaaaccttgtccagctgcctcttcatatcctgaagttccattcatttgaccagcagtaaagagatgcttaatattcttagtttctaaagtgtgctttaattgccagggctcaataacatcatattcaatcgcatatcctggacgcattaattctgctttttctaatccagcaacactatgaagcatctttaattgtacttcttcaggcattgatgtagaaaagtctcctacgtagatttccttggtgttacgtccttctggctctaagaaaatttggtgacgatctttatctgcaaaacgaactactttatcttcaattgaaggacagtagcgtggtcctacacctttaataactccagaaaacattggtgctcggtcaaggttggctctaataatgtcgtgagtgacagtattagtgtatgtcatatagcaagacatttgatcttttaagtagtcactatctttactagtgtaagaaaaatgtcttggttccttatcgccaggctcttcttgagtctttgaataatcaactgtattaccatcaacacgtggaggagtaccagtcttaaaacgacgtaatttaaagcctaatttttcaagattttcaggcaatttgatcgacggtaaagagttgttaggacctgaagaataggttaattctccaataataatttttcctcttgcagcggttccagtggttaaaactacgcttttagcatggtattttgcaccagtattagttattaatcctttgcatgctccgtcctcaacgatcaattcatctgcaacagcttgccgcaaagttaaattaggttcattttcaatggtatctttcatatgttcatgatattgccatttatctgcctgtgcacgcaaggctctaactgcaggaccctttcccgtattaagcattcgcatctgaatgtaagtcgcatcgatattcttacccatttctccaccaagggcatcaatttcacgcacaacggttcccttggctggtccaccaactgatggattacatggcataaaagccaccatatctaaattaatagttaaaagaagtgttttttctcccatacgagctgccgctaaagctgcttcaactccggcatgtccagcccccacaacaataacgtcatactcgttcgattcgtatgtcttcatttttctcctactttccaagacagaattgactaaataactgtgtaattaattcgtcaggtgcactttcaccagtaatttcacctaaagtatcccaagcatttttaagatcaatttgaaccaaatctagaggcattgcatcatcaattccactaattacatcctctagagactgctttgctttagtcaataatccagcttgtctttgattcgttaccaaaatttgattttgagaattttctattccgctaaagaataatttttcaatagcattctcaagtgcatccatattcttttgttttaagattgacgttacaataataggattatcggtaatgtctttaatcatttcctgggaaatttttgtacctaggtcctgcttattcaaaataatgatccgctttttatttgctgttaagtctaataatctcttgtcttcagctgttaaatcttgacttgcatcaagaagtaaaagaaccaggtcagcttctttaatagccttcttagaacgttcaacaccaatcttttcaaccttatcttctgtgtggtggatcccagcagtatcaatcaacttaagtggaacacccttaacagaaacatactcttcaagcgtatctctagtagttccagcaatatcggttacaattgctttatcgtcttgagttaaataattcaagagcgatgattttccaacgtttggtctgccgacaattgcagttgctaagccattacggataattttcccttcttgagctgtttgaagtaattgctcaatttgttttgaaacttcttgtgctttctttttcatttcttgagaagttaaatcatccatatcatattctggataatcgatattaacttcttcatgagccattgtatctaacaattcttgacgcattgtcttgattttatctagtaatccaccagctagttgcgtcatcgcaacttggcgagatttatcagttttagctctaacaatatccattactgattcagcttgagttaaatcaattcggccattcataaatgctcgtttagtgaattcgccgggatctgccattctagctccattggccaaaagcaattgcaaaatatcattagtaacgatcattccaccatgacaatttatttcgaccatgtcttctctggtaaaggtttttggggcacgcaacacgctaaccatcgtctcatcgacaacttccttagttttaggatcaacaatatgtccatagtgaattgtatgcgtaggaactttggttaaatctgcccctttaaaaagcttgtttgcaatcgctactgcatcttcaccagatagacgaacaattgaaattcctccttcgccaataggggtagaaattgcagcgattgtatcaaattgtgttaatacttgtgccattttttcacctacataaataattaaataaaaaaagtgcccactccaccactataaaaacaatgatggataaagcactttgactactttatcttaacaatttaaagataatttatttttgttttttacgtcctaaacgtttgtatacacgacgaactttacgttcacgttcacgttctgccttcttttgttcttccaattcacgttgatacttgaatggattttgcaaaataaaggtttgaactacttggaataagtttgaaatcacccagtaaagtgagatcgcagattggataccaattgccgaaaccccaatgataagaggcattaagtatgtcattcccttagtcattccattttgtgaggattgaggcgttgacatctgactaatatacgtacttataaaagtaaatgcagctgccaaaacaggcatgatgtaatatggatcgggacgtcccaaatccatccacaaaaaccgaccattttgtaactgtggagtccgccaaattgcttgatacaaggcatacataactggcagctgaattagcatcggcaagcatccagtataaggattaatgccggcttctttatacaacttactagtttcttcttgcagcttttgacgtgactcaacatccttgccaggatactttttacgcaatgcatccatctgtggttgcactttttgttgcttagccatgctcttaatagaaatggcattcaatggtaataaaattattcttactataatagtaaagataatgattgcccaaccataggaatcacgaactaaacttgcaatccaaagaataaattgggaaatatagtaaacaatataccgatcccaccaattgccactagtatgagaaataggagcaacacttgatccattagtagatgcacaacctgtaactactaaagctaaggttaacattcctagacctaatagaatcagtttccaatttttcttagataaatgatttctcactctacttttcctcagtttccgtctcttcgtttgataagactttagctagccttaagacatgaataagattctttttggttcgtcccatgtcaaaatctcttgcatagggcctagcgattactaaaaagtctaaatcagaccttatctctggcttaagttctgtcagtgtagcacgaatgaaccgtttgaggcgattacgtgctaccgccgtatgacccacctttttcccaacagaaattccaacgcgaaaatgcttttgtttttctttgggcaaagtatagacaacaaagcctctattagccatcgactgtccttctttaaaaactttttgaaagtctctctcagtttttacacggtagctttttctcaatctggttcatccttacttaaattaaaaaaaccactgagcttcagtggcttaagcagataagacttttctactctttttacggcgtcttgctaaaaccttacggccgtttgctgtagccatacgcttcataaaaccatgaacgcgtgaacggtgacgcttcttaggttggtaagttctcttagttgacattaatgttgcacctccgtttttcaatgcttaataagcacaatttctaagatagaatagcatatttacgcttaaaaaccaagtctttatcaaaattttcctgaaaagaaaagcttttttaaagttattttcaaatttatattttgtggatatcttgaatacatatttttttacgttttttatcaacaagataattctcaaagttatgcacaatccacaccctgtttagaacataataaacaccctgtgtataaataaatgtttttcgtctcaaatactgctataccactaattttaaactcacataaatttgtggataacgcaaaattgaaattttatttcatagatcagtggatttctattatcttttttccacaaacttgtgaatttgttagttatttttgttccttgtggaaaactttaaaaattcatgctaaacttattttgacttaatctgtggataatacagtacttggaggaattttt

SEQ ID NO: 6 - DNA, 76586 bp, Lactobacillus gasseri
  source 1..76586: mol_type = genomic DNA
catattttctacaaatcggtacagctcacataatttttctttcagcgttgctgtagatggatacatatagaagcctgtgtatcctcttttaaaatgatgtccttttaattcgattaaattaattgaatctgaacatgagcttatatggactatcattccataattctcgttcacagtatgattgccaaatcgaattatgtctcccacatgccattcttctcttttatctattcttttatctattactcgcatttaaatcaatccttttactattcaaaaaccacactcatcgaacaatcataagctttgaccaagacttgcttagtatctttcagatacaaaacttcaaaaatcaaagaatcaataccttttacttgatatatatatttgtcaccaacatttcctttaaaagaaacattagtcggaatcgttcctttttcaatatttggcaagctgttacaataaccaactacggccattcgaaataaactgtctttatacgtcatcgtttaatctctctcttctttttctaataaaatttgttgctggctttgaatttcatctttgcacatctaaagccgttttcatttctctcacctctaccaagcaaaagtaatatttaaatccgtagaccatttattaattattcccaatccatagccaacagtaccagcagggtaattcttaacttcacatgatagtaatacaggttgaaatttaaagcatagatatctttgtaaatctacagcttgcgcaggagataatttatttatcaaaagcctcaagcgtaaatatgattcgattgttttctgcttatattttggaatcaaaaatatccttgaacctaaaacatcatactcaagaatatttttttgtaaattaactctttttgctaaatcacaaattctcttattaagggacgtggtaatcatcatctcatcatcaagagtttcatttgcatctttaataaattgtggatcgctcaaatcattattattttcatcacgtcccaaatatggaaatacttgatcaagaaactttaactccagttcgtgatgtcctcgacgcgctctatcttttaatttctcctcaattaaagttactagccaagccattcgccaatcatcatcagcaaattctgtaactggagctagcttacgcttttcataagaggctttattcagcttttgcaaagtattgccaattgttgatccttgtattaacctagtgtcttctccgttttctcccaggattaatttactttttgtcatatgtttagtactctctttcgttcaaaatctcatcgacattttctacgttgatctcatcacttacccagccacattcttttaccagctttttaataatgctcttaggtttatcgttctccataccatccagcttaggtaatctagtagcactaacgtctgtgaaactatatacgccttcactaagatcatgagtgaaccaggatcttagtcctacaccttcactgtcaaattgagcttttgcctttccagctgtatcagcccaaacaagtgatatttctccactatcttcaattctcagttcccaggctttcgtcctgagactccttccgcatataggacaacaagcaatttctcttgaatttctttcttgaataccgtttatcttgtcaccagtatcattagtcgtacagctgatataatagtgcccatgttgcttacaaataaccatctcttctcctgggaaccctagctgaaacataaatgatttaccgtagttaccctcaaaagtgcaatattcgcatttttcttctagcattattgttcgtcttctttcaaaatgaacttacaaaaatcacaaatatattctccatttgataattttgttgtttcttccggttcgcactcatcatgacatcggctacatacaaatgcttcaagcttagtcccaagaactacgtaatccttttgctgcatataagacgtaatgtaagtgacttttactacaaggctattttccgtatatgcttcagcttttggatcatattctcgtagccaaagttcatctcctacgttaaaatttctatcgttttttctaatttcaaaatttttctttccttctgcctgtgctcgaaaatactcaggttgaattttaagtatatgcaccccacgtggtttttctaaaacttttctagtcttcttttccatgtttatttaccctcctctaaatctaaatactcaacctcgttaaatctccaagtatcaccgccgtattggagccatatttgtgatatttttgaacttgataaatctaatttttggcatgtaaaccactcgggtctatatctttgctcacaatcagggttttcactaagctctttttcaaaatacatcaatgccttttctctgctatcagcaataacaattgcattttgaatagctccttcgagcaaatgatctgtagactgaaccaaataaacatttttaatattatgctgctgtgttttagaaactgtttcgcgtagataatacgcttttggcagtagtttgatagttcgcttaactattgcttgatgtttgcgactataagaaactgagatatagccttgttttttaagcttagaaatttttctagagattgttgtcggaataagtttaaaaaagtcggcaaaatcagcgttagatgctgtacaaccatctttttgatctaaaacagagataatctttaaaagaacaacatcatcaatacttaatccgtctttaaaatcgtttgcgcttatttttaagttaaaagtttgatttttattcatgatcagagttcctcctttaatcaaaatcaattccccattcgtggtacagttgctgcatgtctttacccagttcatagtctgtcacattagcagacatggaattgccgtgttcagcatcgttcaaagtcttattgtcgacattactactaaattctttaaaaatagcattcatttcttcatcactcatttttggttctgatttaaccgtatcatgttcagcagcatactttttccagtccatagccttacgtacaggcttaatttgcttgtagcgttgattacttgatttttgaggcgttaaatcaagttcatcatcgaagcgaccattaaaccatgtagagcctatttggatatgctgcatggataaattgttgagcttaacatatttcacataagcttccaatttttcacgcattacggcgtaagtatgactcctactctttttccgccaagcttgataatggcgaaatgcttcttttttagcagcttttcttggatatatggcccatagttgttcaaactcttgttcataaatttgagttggagttaattttttggactcgcacacacgttcatcggcgtgagcagatgaacatatatcttgtgtaatctctgagtagtctctggtaatctctggtataggtccggtaactttttccggttccatttggtactttttaccgaatgcattcggaactttcttcctcttcgattcggaacttttttccgaatgcgtcatatcgggcttttcagcactattttgatcatttataagagaattgagcttatcgtaatcgattgtgtaccatttagttcgatcaaaccctgcacgattgaaattagaagtaataattacttgcttttcaatcaacgagctaaaacgatttcgaatggttttttcggtcatccatggaaattgcaccttccagtcgtcaatagtgttatatacccacctccgaccttcgaatactttggttgaacgtgaaagccagtactgcacctgctgaagcatgatagcttcgttaatgtttttcaatgcgacagcaagcgatggcaacacctgtaatggattctcattaattaataatctacttgaactagtaatagtcatgatgtgttctccttttcagcaacatgatcaacgtacgccaacatagtaatctggcaatttttcatcaaacaacaagattaaattctgaatcgacgcttcacgaatatctatatccgttgtattcatggtttggatttcaaaacctgtttctgagtcaataagcttagttgtgatagtatatttgccgtttttaaacaaataatgaactgtactttcaggtttaaatccatacttatcgcacaagtcattaattgactgcgttaacgttttattagctaatttttgtgattcaaaaattttgctaaagtctctgcgcgcttgattgaatttgtttttgaagttttcaaattttattgcattacctttgattttcataaaaattcttctttcaaaaatctgttgtttgatttttcaaacatctaagtaaaataaaaaagatcttttaatatgtttgaaaagtcaaacactttaattaaaaaaatagagcatttaagtgtttgaaaaatcaaacatcttgctattagaaactatactcttgattatttcactttgcaacacctttttaattttcaaaaatgctaaaatagaattatattttattattttataaaataacttttttatactagtatatttatttttataatgaggcgataaaaatgaatgataacttttctgcgcgcataaaaaaagcgttagactacagaaaaatgaacgctgctgaattaagtagaaaaactggtctttctagaggtatgttaagtcaatacatgaacaatcaagtaaaaccaaaacaagataaagtatatcttatagccaaagcgttaaacgttaatgcaacttggcttctaggataccctgatacagaaatgctaccagaagaaaataaccaggaagagaaagaagaagttcataagattactagtaaagacatatttacggctgatggtaaaaagattacaggtcaagaaatactagatttgataaatgaacgaatcaggcaaaacaaaaataagcataaatgatacgcagaacctaaatcattgctttagattctgcattttttatgctcttcagatattttgaacataatatttttatatgatacttgttttactataataatatataaataatattcaaaaaaagtattgtagtagtataaaaatggtatttaaaagtcaattactttcaacagcatcaaaaaaaagcagtcaagaaaatcttgactgctttatcagatagctaattcatgctataattacttctgaagattgaggtaattacttcaatagtcaggttggtaaattagcttagtgctactatcccaacgcaggccaatgcgttgccaaccagcacacttacaaaaagtttccgtaaaggacacctctttgtcatgaattaggttcgcgaaattctgacctgcactatttaattataacagaataaagcctaaaaagctgcatagtatcaagctttttaggctttttctttgcttaagatcatatctgaatattattgttatattttttgtataatatttgcattcgtgcaatagtattattgctatagtactttaatgatataaaatagctgttttcaaacatctattttatatcctgctcaattatctaagataatatagtatctttatcctaaggatttcttataaacaatcatcacttcatccttttcagagactgtaaaatagtttgtgtaaggatgaataattccttaaatttatttcttaaaacattagaaaaaggagttcctttctcgtatgattggtttgaacaaaaaaacacatacagaaagaagaactccttcatgaatgattttaccaaaaatatagcacaagctctattcaatcaagacaaaataaacgatttattgcgcaaagaactccagcaagcagttaatgacctattagaggctgaactgactgcgtttttaggctatgatccttatgccagagctggctggaatacaggcaattcacgcaatggtgcttactttcgcaaggttgatacgcaatttggcgagattaaaattcaggtgcctagggatcgtaacggcatgtttcatcagcacacgctccctgactacaagcagcactccaatgtcttggaaagcatgattatcaagctatattccaaaggcgtaaccactagagaaatagccgacttgattgaaaagatgtatggcagtcattacagcccagctcaggtatctaacatctccaagcagatgattccaaaagtcgaggcctatcatcagcgcaaattcagtgacaagttcttctgcgtttatttggacgctacctacattcctttgcgtcgcataacctttgatcgtgaagcagtttatattgccattggcatcaagcctaatggtcacaaggaagtcatcgattaccgcattgctcccagcgaaaacgtcgagaattggacggaaatgcttcaagacatgaagtctcgcggtctagaacaggttgagctctttctttcagatggcgttgtgggcatgaagacagtgctggagcagacttatccgaaagctcattttcaacgctgtctagttcatgtcatgcgcaatatttgcgctaaagtacgcgtagatgatcgcgaaacgatcatgaatgaattcaagcaaattcatcaacagccaaataaggaagccgcgatcaaagtcttgcacgccttctatgacaagtggaacagcgcgtacaaccatgtcatcagaaatctcaaagagattgaacctgatctgctagtcttttacagctatcctaagcagatcagggcttcaatttactctaccaatatgatcgaatcctttaacaacgttatcaagcgtaaagctaagcctaaagcagagtttccaactgaacagtcgcttaatacttttattggcattcaggcaatgagctacaacgaacgctatttcaatcgaatccacaaaggctttggtcaggttcaggataccttagaatcctactttgattaaataaaagattaaaaaatcaatctacgagaaaaatctatttacacaaaaaatttgacagtttcaatttattaaacgatagcattaattgaattataattaatgcttttttattaattaaattatctatatttttctcatttctcagcaaaattatgtaaacagaatatgtttttggattactttaccaacataaaattaattagttttcttcctacatataagctacaaataaggttaaatcacccactttaaaatctccaacttcataaggatttgttgcaattttattataaattgcattattgatggcaatctttagatttttatcctttaattttctaaagcgtttttcaacccaatggctaatatagacatcatataccaaaatcttttgcaacctcttctttagttaatggcttagattcctttgcttcttcaactaattgatccaaatcatttggaattgacctgttcatctttttgaattgatcaataagctcatttccttcatacccttgagaaactaggtctcttaaagtatctttgtcaaaaactatattctcctgtattcaaccataaaaaaattagaagaaaaagacttaaaaaagcaaattaaaaataaaatgctgatactaaatcgtttcacatagatatcaaatgtatggtaaaatgatatcaagggagtggtaatatgacatcatcaactacaattcgtttagatgacgagttaaaaaaagaattacaaaaagatctagatgctgccggtattagcatgaacgcgtttttcgtaatggcggccaagcaactagtattgcaaaaaaagattccatttgaaatcttaactgaaccggagattcctaacgatactactcgaaaagcattattgttggctgatgcaaaagatgagggaattatacctgacgattcacccagctttgacaatgttcacgatttaatgaaatctttggaagaaaattaatgtttattattaaatatgagccacaatttaaaaaggactataaaaaatttaagtacgaacacccagagctaatcaaggattttagaaatactgttaatcaattaatcaaaactggaaaagttgagcaaagttatgatcttcacccactagataaacgtggaggtaaatatagtggacattttgattatcatttaagtgacggaaaagtagatattttagttatctataaacctcataaaacaaatccccaaattcgcttagttcgtattggaaaccacaaagatatatttggtgggaaagaaaaataagtaaattaaaacagctgttgagcaataggctgtagtgccccccgaacttcggacacggatttcgggggttttactatgtctaaattaactaaaaaagataaattgaatatttataaagaatggactattgaaaataaaagatcgacatatttaagtaaaaagtatggaataggctcagttagtattaagtacttagtttcactcattcataagcatggaatggatatattagataagccccatacttattattcagcccaatttaagctagaagctatcaatcgggttttagtcaatcatgaagctgcttactctgtatctttagaattgggcttgaaaagtcaagggatgcttattaattggattcgctcttataaagaaaacgggtataatgtcgttatcaagaggaaaggacgacgaacccgtgaacaaagaactagagaaattgaagaaagaaaacgaagaattgcgtcgccagaatttaaagcttactgtcgagaacgcatttataaaaaaattgaatgccttggttcaaaagagaaaaaaccaaccaaaacagaaatagcacaagctgttagagaattaaggctagaacttgggttgggtgttaaaactatcttatcgattttaaatgatctaaataatgatttacctggtttatctagaagcaattattacgatatcctaaagcgtgaagatcaagatgaaataaggcaccacagtctaattaaacgaattaaagaaatattctttgaacttaaagatagatacactgctccaggttatcgaacaataactgatcacttacatagtgaaggctttataatcaatcgaaaaacagtctatcgtttaatgcgtaaacttaatttgattggatatcgtatgaaacgtagaagacgctacaacagctttgagggtgaaattgaaggaagaattaaacctaacttaattaaacgcaacttctttgctattagaccaaatatgaagtggtacacggatattactgaattcaacttaagaggacaaaagctttatctatcgcctattatcgatggctgtgggagagatattgtcgcttataatatctctcgtagtcccaacttgcagcaggtaatgactatgcttgatgatgcatttaaagttaatgattcattgaatggattagtatttcattcagatcgtggctggcaatatcaacataagacttatcaatatgaacttgcaagacgtggcattgaacaaagtatgtctaggaaaggctgttctccagacgatgggcttatggaaggcttctttggcatacttaaaagagagatgttttatggcaaagaatcaaactatgccaatctgaatgaattagaacaagcgattaaagattatattcatttctataattacgaaagaacaaagagtaaactaaaaggactgactccgattcaatatcggaatcaatccttagttgcataatattaataaagtgtccaatttttgtgggtcactacaggcttaacagctgttttgtttgacatagctcatctgctacttctcccccccatttggctttttatcaaaatatacttcaaactcttttattgatttttctattatagacctactcatagttatctttcatcaatcaaatcaattaatttagaccataattccctatcataaattaaaagatgtgatattacctatgtctgtttagtgtaacattagggtgtgcttaatgttacacttatcgaataaaaaaggttaccagcattatgcttaagcaacctctttaatatattattagtagcaagacttatctttctaaattttgatcttgcatttgatatttataatcttttttatttttagtatcttgacttgtaaattgctttttataatttgctcttacactaggattattaaataccttcttttccgtttcataggcagccttagcacttgtatctttatgcttttatttagcattctttctgtcaatttcaatatttttcaccattttagaaatattacttttattagttgcaaaatgattttcttttaaaaatttcttagcatatactcgatttaattgttcttccgcattattttgagttctttgtttttgatcgagatcaattccttgaataccattttgataggtccaatctttgattctttccatcttattagtacggtaataatcgctaatcaattcattccattttccccatttgtccaaaggaacattaagcaatccagcgccaccatcaatcatgatcttattggctgctaaagtagctgatcttttatttccgtcccagaatatttgattcctcatattgtggtacatcaacgtcatagctttatctgttgtacttatgtctttactcatcagatcttcaaaatactctttttcttttgtttcatcaggaatttcaggagtatacgtggcatcagctgcgagaactacttgagaagaaccggttcttattgctcctggttcaagtgcgtcatgtagagccacaattttattaattgacttcattttattgaaagtaagtggctctggatcattgataatgtattgccagcccctttttaattgaacaatagtattaatatcatcaatagaaacgccatcaacacctaatccatcaataatggtttgagtttgaggcaatgttgttgttaacccctcaaagcgggaatttgtatatacaagacgtgttagattttgtatagctagtcttctgttttgatcagttgtcaggctatatttattttgtaaaatcattatgctaccttctttccttaaattatttctatttaataaattgaattattaaactacattttctatttcttcctatttgtaattataagatttaaacatatctgtttaactttagggtgtacttaatgtaacttcaattaaataaaaagctactcagcattatgtctaagcagctctttctaccaaatatttcaaagaaataatcatatttctaaattttgatcttgtgtcttagacggatataattctttcgatatgtgattgttatgctctttaaatttattattataagtcttttttaccaatgaattatcaagtttttctttttcgcttttataccctgcttgtacactgaaatccttattttttctcgattatttattctatttaaagctatattttcagatatttcttttatatttttgtcacttacttcaaaaggattctcttttaaaaattttcgtgcatacaccctatttaattgtatatcagtcttatcaaaagcacttgtatctcttaccccgtatatcttttctttagctgatatagtactttcatctaattttttgatctcatctttgtagaattgttcttgtttttgattttgagaaacataagccgtatatctatctttttcttctgccattctttctttagcataccctactaaattatctacgtttctatctgcaagattctgtaaataaaatggacgatcagttaccctaactactaaaaaagacatttcatgttttgctagctctaaattaattaattctcttcctgttctgccatttccatcgtcaaatgggtgcattctttcaaaatcaatgtgcgtttcaatcaaagtacgtaataattcatcatcatttttagaattttcaattctaaatgacgtattatctatccattcatgcattaattgatataccacttgtggtgaagccgtcttaaaatccgctcctgcaatataattttcatttgttttaaacttaccagctatagcaatagtattttttgtcaattcaaattgaagttttaacagggtatccatattaagcggggcattattattagccaaatatattaattcattaaaagcgtctttctgattatcagcagcatataaatccttcaacttaaccccttcaattccagtagaagttatagtttcattcaaaataactgccctagtctgtcccaaagttaatttattgccctcaattgcgtttgaattataagcaaatctgaccatgacatcatctagataatcttttggatatttcaacatagttttttctccctatttttttatatcaaaattattttttcttcctatttatattgcaaatatgctaactaatttactcggaatcttttaactttaattcgttaaaacgacgctgcaacgttttgatactaatgccagtctttctgttaatcattttatatgtattcccttgttttcttagctcccaagccaattctacctgttcttctgtaaattttttaggacgaccgtctttataatgaggatcatactttttagcataggccttgccttcttgggtacggctgacaattaaatcacgttcaaattgcgcaaaagccgaaaacatagtaaacataagttttccatttggactatcatcaaaatagcccatattaagtatattaatttttatacctcgtttatttaagtcttccactgttgttaaggcctcttgagtatttctagcaaaacgatcaagtttagtaaccattaaagtatctccggaaaggagtaaactaattagtttttcaaatatcggtcttttggttgttgtgcctgtccatttttcttgatatatttttttagctcctgaatttttcaattgttttatttgaggctctaaatgctgttcttcagttgaaactctggcatatccataaattgtcggaacatgggtttttattctttctttttctttttcaattttccatttttgaaattcatcaaactcaaattgatctactattttgttcttttttatattttttgattcttttttcattaagttttgacctgtacttttgatctgttttaaaaatgctcttaaatacctataaaaatagtatcattattaaatcacaaataacaggtcaaaagtgttaagttttgacctgcaacggtaaaaaatataaggaagcaaaactttttaatcttgcttccttattctagttaaaactcaagttggacgtattatgattaacccaatcatatttttttaaaaaaagaggtgagcttttttgctgattatttatattcgctttagctaagttcaatttataattcgaatctagtgctaatagcaacttacttgaaatacccattattttttcaattcttaaagctaacacttctgttagaaatctttttctatttaaaatatctgatatatttttctggcttaccccaattctagcagctaaatctttttgagtaatgtcgtaataatccataacttcttttaaaagattagcggctgatgaagtatgatattctttaattttattctcacgatgcaacatgcaatcactccttttagtgataatcctcaattgaaactatcccacttttctttatcgaaagttcatcgtttttatcatagccttcaaaaatcattctataatttccacttacatcaacagcaaacttattatttaaattaccagttaacggatggcaacgaggcggaggatcagatggaatttccgataaattgttagcagcgctaaattaatctaaacgatctaaaatttttttggctctatttttatcaataatcgttcattattcaatatttttgtgagttttttagtttctgcaaaatattccattctttcacctgatatagacattataccaaaacggtatgttttagtaaatatatataatgaacaaatattaaatgactcaatgattattagaacataaaaactataaagcttacgaaaatacatatgcgctgtatatcacattaactatcttgttttctcccacatcaacataataggccttagcctgataacctttattgcgtaacttattagcaacttctgtagctgtttcactgttaatgtctgctacagcaatagcatatccatccttcactaaacgttcagcaatcccttttccaattccttgacccgcaccagtaacaattgcaagtttagtcatttataataccctctataaaaattaattatcaaagtatgatagtgatttttgaaactgtcaaattttttgtgtaaatagatctttctcgtaaattgtttttttaacgttttatttattcaaaataggattctaaggtatcctggacttgaccaaagcctttgtgaattcggttgaagtagcggtcattgtagctcattgcttggatgccaataaaagtatcaagcgactgttcagtcgggaactccgctttaggcttagccttgcgcttaatgacgttattaaaggattcgatcatgttggtagagtaaattgaagccctgatctgcttaggataattataaaaaacaagcaggtctggctcgatgtctttcaggtttctaatgacacgattgtagctcttgttccatttggcataaaaagcatgcaatacatcaacagcagccgctttattggcttgctggtgaatctgcttgaattcgttcatgattgcctcgcgatcgtccacgcgtactttagcgcagatgttgcgcataacatggaccaagcagcgttggaaatgagcttgaggataggtctttgccagtgctgctttcatgccgacaacgccatctgaaaggaaaagctctacttgctttaaaccacgagatttcatgttctggagcaacgccgtccagacttcaatattctcactaggcgcaatgcagtagtcgataacttccttgtgaccattaggcttgatgccaatggcaatatatactgcttctcgttcaaaagtttctcgacgcaacggtatatacgttgtatcaagataaacacaaaagaacttatcgctcagcttacgcttgtgataagcctcaactttaggaatcatttgcttagagatattagacacttgagctggactataatgactgccatacattttttcgatcaaattagctatttctctagtggttacacctttagaatacagctttataaccatatcttctaagagatcagtatgttgtttatagtctggcagagtgtgttgatgaaacataccattgcgatctcgtggcacttgtacctcaattgatccaaactgggtatcaattttacggaaatacgcaccatttctagaattaccagtattccagccatttctagcatagggatcatatcctaaaaaggcagtcagttcagattctaacatgtcattaacagcttgttggatttcatgacgaagcaaatcattaattttatcttgattgaatagagcttgagttatatttttggtaaaatcattcatgaaggagttcttctttctgtatgttttttttgttcaaaccaatcatacgagaaaggaactcctttttctaatgttttaggaaattaaattaaggaatagttcatccttacacaaactattttacggtctcaaaaaacagctattatcatataaatatataatttatgaatatttattaaggaaaaattattaaacatgatcaaataacaaattaaggcacaaaaaaagattaggtttatcacctaatctttctttggatcaattataaatagttcttctacttttgacgtttctttctgttaacacctaagcctaataagctacctacagtggcaattgctaagcctaaaatacctacttgttcagtcttagaaccagtttgtggtaaagtcttcttactttcaactttagaactagttacagttgctgccttggctacattagtattaccagtattagcttccttagataatgtatctctattgctttctacaacaggatcaacatagacagttactttaacatctactgatgtaccatctgggaaggttacagttactataccagtcttctcacctacagagttaacatctggaacttctttccatgtgtacttagtgccatctggcatctcatctttattctttatggctgttgatggatttggtactacacctggagtagtgtgaacatcttgtggttctggagttgggttatcaactacaacatgaacttcaaccttatctttcgaaccgtctgggtatgttactactactgttgctgttgtagtacccggcttacttacatccggagtcttctcccatgtgtacttagtgccatctggtaagtcgcccttattcttgatgccatctgctggatctggtactgtacctggcttagtatgtacgtcttgaccttctggagtgtacttgtctgcgtctggagtagtatcggttacagttactgttactggaacttcaactttctttccatctgggtaagttactactaccgtagttgatttttcaccaggagttgttgtatcaggaacttctttccatgtgtacttagtaccatctggtaagtcatccttattcttaataccatctgctggatctggtactgtatctttcttaacagtaatgttttgatggcttattagcttggtaagtaatagttactaccatattagctgaatcaggagttacaactactgcgtctacattaccatcaactttggctacataacccttgatttgttcaacattaacagcacgtaatccctgtttagctggagtccatggattcatagttgtcttgccagttactggatcagtataaccggcattactatttttatcttcacgagtaaacttagcagtttgtacacttgtactaattttaccagttattggatcaactacattaatagtacgagttacttcacggtacatatctttattagatggatcaaacggtactggaatatctgcattcttagtgtagctaattgttacgctagcagcttcagtttctgcagttactgtttttgcttctaccttagcttgtgatggagtgtaacctgttactgatggtgctgtatattcttcccagctaccagtcttagcattcaaatcacttgctacatgccagtcagtattgtatttaatctcgcctgttactggatccttgtagccactattaccatctttatcttcattagtgaagtgaacagtttgagtaatagtttgtggttctttacctggttccttaacgatgattgtacgagttacatatctgttaatggcatcgtttacgccatctttacctggtttgtatggtaccggagtactattttgctttttgtaagttactgtgatgttttgaccattttgtggtgtgccatttgtttcagcaactttggcagcatcaacttgagtagcctttgcaccattgatatatgcatcatagcctgtgatttggtcaacactgtattctgggaattcagcagtttgaccatcagccagtttccattcattccagataatttccccagcatctgtaccatcagcattaatcttgtggtatccatcacgtacatagtgaaccttttgtgttactgagttaattggtgaatgaccagttccagttacatcatattcaattgtacgttctacataaaggttagtatcgtcattaactttactacctgaagttggaacatgtgatccagtcttaaatgttacttgaacatttaacttagtaccgttatcaaaagtaaattcaacaatcccagtcatgttagaagcagcaaatttgccatctttacctggcatactattttcagcccacttaataccagttgggttaccattgacaaatgtcttacctgagatactgttagttgctaagtaattcttaataccagcttcatcagttggtacttcactgccatagtttactggaatattatttttaccagttgcaccaaggaagttgtagtaaacattagcccaagcattgtaaccagcaggtgataaacctagtttttgcaatacattagtatcactaatactaaagtcgtaacgatacttagagttacctgctaaacctgatggatcattggcatcggtttgctcttcagagttaacagcaccattttcaagttggtaaagtgtgtctgcagaaccattgctaaagttatcaacaccagtgttaacttcataacccttctgccagttaaagctaattgcactagcatcaaagctgtccgtagcatcagcttcgtttacatacttagtaccatcagcacttagcttgtaaatcacatgcttgttatagtcgctaacgatgttacctttcttgttccaatcagagtaatatgtgattgtttggaaggcactgtctttagcacttaatttatggctatcagtagtcttgtgaacagtagtaaggttgccattgaagaccaccatactttgatcaccgtagtaaacaacgtcaccactacctggatcaaccttgttaccagtgatacttacaggaacttttacttcagcataagtaccgtcactataagttactttaactggaacttcaaatgaacctaatgttgcgtttttacctacactagcagttaccttaccagtatcatgatttacatcgatagttacacccgctggagcatcaaagtcacctttttcgtaaccagtgattgcaccttctggcatatctgcagcagcctttggatctactgcaccagttgctggtgtgtcgccgctaggtttttcaacatttaacttgtcgtagctaactggatacttctcagctaagttactcttttcggtaacagttactggtacagttaattggtcagtgctgctatctgggtatgttactgttacagaaatatcatgtgaacctacactagtatcatcagttggtgaaacagttactttaccagtatcaggatctactttaatccaatctggagtattttcacctgcagtgtacttagtacccgctggagcatcagcagccttatcgttttcatccttaaagcttggatctacgctatcagacttaccttgctcaacggaaacaccaggataagatggtgttaattcttcactatacttcttttcagtaaccttaagtggaatcttaacaaagtcaactgaaccatcagcataagttaccttagcccaagcaaaaccatcagtagtctttaaattacctgttgggttttgtggttctggataaggaactcgggcacttggatccttgctgtcagtcggctggatcatgatcttgttccattcatccttatcagttgcagaattgtaccaagtaacatacttaacaatatccttgaagtcagtgattggttgttcatcaggaccaattaaatctttaagtcccttattagcatcaagatcacttaatgtttgacgagtagttccatcaatcgtttgcacttctgggtgatacttatcaaaatcatcaatcttaacgtcaggactatcattcaacttgctacccatagccattctttgtggacgccacaagttaaagttgtttaagaagctgtttaagtgcagtgcctgttgtacttcagttggcattgtaccgtttttgtatttatcagcgccttggttcttagacattaagacagtagcattagagttataaagtgtatcaacacctttattcgcaacgacagtattaggatgttgatttttactcataaattgaccagagttattaccccattggttcgtagatatcaggtatcttacataccaaacatcattaggaatagtagtcttattaccttgatcccattgagcaactggtgttggtccattaacagtagtactgttgtagacaccttccagtctaatcaatgtaccacgaatattaccagtacgttgtaagttgacatatgctggggtaagaaattccaataaatctgtaccactcgtaccccacagagtaaccaaaccagtaaatggtgcgttaggttcaataccatattgaaatgtacctgcattgtcttgtaaatcgagagtagcaccggcaccaaccgaaaatttcaacgtggtattagtacttaaaccagcatcacccattgaaattaatggtactaaagtcttttcagtagtatcacgaataatggttaagctaccattgttaattaaactagaagtttgcttagaaagtgggctggcaacactagttattgggccaacatctaatgaaattggagcatagtgggtaccgttataattagatactgaattaacagtactattttcaacaccatcagcctgatttgtttgcttggtatggatagttacattaccctttttaccaatttcaagatcatgtgaccaaatcgcagttgagtgaccagctgccatgttggcattcaaagtaccattaataacagtaacgccatagattggctgaccatctgttagttgacgcccagcataaataccacgtaagtcgtctgatttagcattaatagtaacagttgcaccttcattaattaaagttgaaggattttcactattactagcattttcagttgaacgaattacccagttgtcaggattattagattttccagttactttaccatcaacattaaaagtagtattaccagagtcaaattttacagtcttaccagttactagattgtaaccaattgacatattattaagtgtaatgttgttctctccagcaaagtgaactggtaagttttcaccatacttatcaactaatggccgatcatttaagttagctgtaacaccatcaaaagttagcttactattttcagtgttagatttactgccatagaatgaaattggtgaatagtcatacttgctaccttcaattgtcatgtcctttaaagtaatattccaaggattagcagcattcgtatagttcttatttttcaaagcaatactgtagccagcaaagttaattgtatgaccattaccattaatggttaaatcacgagctgaaccttcagactgcagataaaggtagtgcttgtttatatcacctgtaccagaagtagtaaggccgttaactttaccggtaatagtaatatcattggtaatattaatagttccaatgctactatcattcatggcattaactaagctttggaaatcactggcatcttttgattctgctgcattcttagttacagcttcattagattgagactgtgcttttgatacatttaatacattttcattattaacagtcttaggttgtactgcgtctttgagaccgtaaaatagtttgtgtaaggatgaattattccttaatttaatttcctaaaacattagaaaaaggagttcctttctcgtatgattggtttgaacaaaaaaacatacagaaagaagaactccttcatgaatgattttaccaaaaatataactcaagctctattcaatcaagataaaattaatgatttgcttcgtcatgaaatccaacaagctgttaatgacatgttagaatctgaactgactgcctttttaggatatgatccctatgctagaaatggctggaatactggtaattctagaaatggtgcgtatttccgtaaaattgatacccagtttggatcaattgaggtacaagtgccacgagatcgcaatggtatgtttcatcaacacactctgccagactataaacaacatactgatctcttagaagatatggttataaagctttattctaaaggtgtaaccactagagaaatagctaatttgatcgaaaaaatgtatggcagtcattatagtccagctcaagtgtctaatatctctaagcaaatgattcctaaagttgaggcttatcacaagcgtaagctgagcgataagttcttttgtgtttatcttgatacaacgtatataccgttgcgtcgagaaacttttgaacgagaagcagtatatattgccattggcatcaagcctaatggtcacaaggaagttatcgactactgcattgcgcctagtgagaatattgaagtctggacggcgttgctccagaacatgaaatctcgtggtttaaagcaagtagagcttttcctttcagatggcgttgtcggcatgaaagcagcactggcaaagacctatcctcaagctcatttccaacgctgcttggtccatgttatgcgcaacatctgcgctaaagtacgcgtggacgatcgcgaggcaatcatgaacgaattcaagcagattcaccagcaagccaataaagcggctgctgttgatgtattgcatgctttttatgccaaatggaacaagagctacaatcgtgtcattagaaacctgaaagacatcgagccagacctgcttgttttttataattatcctaagcagatcagggcttcaatttactctaccaacatgatcgaatcctttaataacgtcattaagcgcaaggctaagcctaaagcggagttcccgactgaacagtcgcttgatacttttattggcatccaagcaatgagctacaatgaccgctacttcaaccgaattcacaaaggctttggtcaagtccaggataccttagaatcctattttgaataaataaaacgttaaaaaaacaatttacgagaaagatctatttacacaaaaaatttgacagtttcaatattattagccttagattagtatgttttatttttttaagtagtttagattttcatgagttgtacacttttgcattattactatttattttcgaaattttctattgcttttttcttttgtaataatcctaaagtcttattatagtctgccgctaattgcatatttcctttagcattcctaacctgttctaatatctcagcaataattttctctaactttggtatattagcttctaatactttcttaccaagttcacgatcataaaaatctctaattgtcagttcacctctacttggttgccatacatcaatattgagcttatcatcttcagttttttcttgttctttttcttctgggtgaacagcaaaatactccttttccgcagtaccgtgcttttgcttcaagaatttatcaatagctttaaatttatcttttcttgttaaacatatcgctgaatcaatatttactaatccttcagataaaatttcttcaggagttgaataagtagtattttttttagggttttctggttcaaaagtaaaagtataactaactaccactctgtgcccattagctgtaccatagtttttcgtataatttaaatttgtaaaatacggagaaatttctattagcgcatcttttaaaatttttgaactaaattttccttctcgtgttttttctggtatttctaattgctcccacaaccctattctagttttaccattagtcttttccgtatgttttctaaatgtaatagatccaattgtcctaagttgtttcaaaagacgaagcaaagtttgtgatctaactgatgatagatctactatttctcgagctggatagcgaacaaaatctccagtctttggattaattaataagatattaatcataaaatcattataaacaaactcaaaatattttttgtttgtattattaattattcctttaaacattggaaaactcgctgttatcccatcggcttttatctcgcgccatttttccaatttatttttcatgccttcaatatatgtcccaatactagcattattattatcgtatccgatagcatggtcaatctcattataagtgacacgcgttacaagatcagttggaaactttacttcactagcaattcttgtaagagtttttttatctagattatctttatctaaatttaactctttaactttcttttgtatttgctctttttgatatgcagccaactgatcagcagttttacttaatatcactgttaatattttggtatgagtagcatttaatccagtccagataaccctgtttagctgagatctaaaacgcattaataaattagtagaggcaaatggcttttgttttactgatacaggtaaatctccattatgtgcataatctacgttaaatagatcaagctgctctgagttttcattatcttctacctgcattttttcttctggtttatcaaacaatttatctaaaatatcatcaaaattttcggtcataactagtacattccctaaaaagaataagtttatattttttagtataacttattctttttaccaaaggaaccgtatcccactacttggaccctttgagagaggtacaaataaaacataggtatctaaattccaaaagtcatagtaatcagtccactatttataccccttagcaaatactaactacaatatctagtactttctttttctacaaacacagcattttgaaataaagcataataattctccactatttggtacctttggagcctaaccatcctactattcattaattttcccactacttagtacctttgagcaattatccacagaaataagctacttttttgccttttttagcgctattttctatttctgtggaccactacttggtaccctaaactccactatttagcacctcggactccactacttagtaccttggactccactacttagtaccctagactccactatttggcacctttggaatttgttatcccttgcacctctaagactacagcaatactcttaatattctattaattccttttaatatcttataaattacttattaaattaaataaaaaaagacgagataaaatctcgtcagtagtattaataatctcattaattattttgagtaagactaagcagttttttaaagtaatcatttataaacgttgataaatgtttatagccatttttctttgctaatttttcaattccagatttaacatcactatcaattgttatagaaattgcttctttttctacgttttttttagatacgaggtttaataaatcagagtagttttgagtgttttgctcacttttgttatccgtactattgttgttagaatttgattgctttaatgctttagcaatattttcatcaggtttaaaagccatatatattatcctttcttaaaattataatttgttttctatacctgcaaatgttttaaaaatttcgtcaaaaaactttctttgttggattgccaatttgtggtctttagccatttcgctcaaagagattttgtttaattcggatttattaaataactctttataaggaatatatgcaatacaactattatcgcctgattgtttttcttcttttaagctgtctaaaagctcacgagaacttgttgtattatgttttaacatgttagctaagaaataaagattggcagttacatatgatttatgagatgtaaaatcaattgcttcttcagataattcttttagtcgttcttttaagttatatttagctttataaccatattcgcttggcgtaattgggcttaatatatcgtcgctaacgataatagcattcttggtagctgtgctgaaatctgggtgacaatcaatcaaaatgtaatcatatttatctatatttagtttttgataattatcatatagccacaagtacagcatcatgtttttattggttttattttcgattaatgtttctatatcatctaagtgcatatcaccagcaattagatcaatattttcctcaacatgatgaattgtcacttcatctttagggtttaagatattgcctacactacctttttgatcataaacattataggtttgactgagattgcattgatgatctaggtcaataaaaaggacgttcttgtgattgtctgctagccatgatccaaagttatatgcaatggtagtctttcctactccacctttaattgctgagaatgtaattatttttgtcataatattagctccttaaacttagttctaaatatttatttcagtattattataagtcacatcctttatattatcaagataatatttagatattattgcaaagccttacaagaaatataattatacgattgaaatatgcataaacatatttcaaagatcatacttcaatagtataaagaattatacaaaaaaggaacacaagtaaaaattgtgttcctcttatgaaataaatatttagtagctaagctacaatattgattgtaaaggataatgtttgtaattacaacatgaaatcttttgttgaaagaatgcgatagttgatagctttttcttcattaaataaatcttcaatcttttgctgatagtctgtatcgaaatatttggtaaattttgataacttattatggctgatttccaatcgattttttgatagtaaatcattttgattataagctttatctattaatctattgtacatagcaacccaaggttgtaaatttgtaatgttagttgcttcttttaatgttagaaaagcttgaattcctaaagtgctaagactaccaaaataatacatatttttaatttcttttgctttatctggaaggaaaaaactatattgcgaatcaaatgtttctataaagtcaatagcatcatagccattaaggaattaacattaagattgttcgctattttctttttatctttaagttgtttttctatcttccatataatttgctttgattcaaaaaatagaattgtatttcctgattctatgttaatgggcattgccatatgaggaaaatatgtttccccaaatacgtaatttgataacacatcgctattcatttacagtaagatcctttcttaattaaattgggaaattaaagatggatattgatttgtaattagttcatttacacaatcaaccatgttaaaagggatcgcacaaatttccattagatcatataagtttgaaaaatatatgttattcttgcttaatcctttaagaagaaactgtcaaattttttgtgtaaatagatctttctcgtaaattgtttttttaacgttttatttattcaaaataggattctaaggtatcctggacttgaccaaagcctttgtgaattcggttgaagtagcggtcattgtagctcattgcttggatgccaataaaagtatcaagcgactgttcagtcgggaactccgctttaggcttagccttgcgcttaatgacgttattaaaggattcgatcatgttggtagagtaaattgaagccctgatctgcttaggataattataaaaaacaagcaggtctggctcgatgtctttcaggtttctaatgacacgattgtagctcttgttccatttggcataaaaagcatgcaatacatcaacagcagccgctttattggcttgctggtgaatctgcttgaattcgttcatgattgcctcgcgatcgtccacgcgtactttagcgcagatgttgcgcataacatggaccaagcagcgttggaaatgagcttgaggataggtctttgccagtgctgctttcatgccgacaacgccatctgaaaggaaaagctctacttgctttaaaccacgagatttcatgttctggagcaacgccgtccagacttcaatattctcactaggcgcaatgcagtagtcgataacttccttgtgaccattaggcttgatgccaatggcaatatatactgcttctcgttcaaaagtttctcgacgcaacggtatatacgttgtatcaagataaacacaaaagaacttatcgctcagcttacgcttgtgataagcctcaactttaggaatcatttgcttagagatattagacacttgagctggactataatgactgccatacattttttcgatcaaattagctatttctctagtggttacacctttagaataaagctttataaccatatcttctaagagatcagtatgttgtttatagtctggcagagtgtgttgatgaaacataccattgcgatctcgtggcacttgtacctcaattgatccaaactgggtatcaattttacggaaatacgcaccatttctagaattaccagtattccagccatttctagcatagggatcatatcctaaaaaggcagtcagttcagattctaacatgtcattaacagcttgttggatttcatgacgaagcaaatcattaattttatcttgattgaatagagcttgagttatatttttggtaaaatcattcatgaaggagttcttctttctgtatgttttttttgttcaaaccaatcatacgagaaaggaactcctttttctaatgttttaggaaattaaattaaggaataattcatccttacacaaactattttacggtctctttaagaattaatttggtagcagttctatctgcataatattctcttttaatatctagaattgcactatcacagtcacaatgttcttgatctccatttaaatagtgacctagttcatgtgcaaattgaaaggcttgttttctttctcctatgtctgtgtaatttaaaaagatgtttctgtcttctggaacaacacatgtaggtatgggactcccaggttcttctagattaacgtctaatttgtattttttagctatttcgtataaaaagccgaataatatatccttaatatccatttctaatcactcttttatcatatctcgaacatatgttctaaacaaaagaatagcatattagtgtttgctttgacaacaacaatgttattaaaactattcaaataaattttttagatttttggattataataaatatggaaataaaatgaggagagaaaatatggctaaaggaagaaaagaattatcattggctgctcgtatacgtagagagcgcgtcaaggaaaatttaaatgaacttttgaaaaaaagaggtatgactcagaaagaattagcagaaaaaacaggtatagcatatgcaactataaataactatcgacgtgcgtacgcacaatcttctttacctagtaaaaaaaatctacttgctatggctaaagctttaaattgtgagccggatgaaattgatccatcctatctacaatttgtagtgactaatgataagttagataataaagagaatttacaaattttctcttcaaatttacaagctttaatcagtcgcgaaggactaacttacaaggaattttgtgaaaacttaggtatttcgtatcgtgcattatggggttgggctactggtgagattaaaccaagtgaagaaagtctagagctattatctaagcacttcagaattccaattaaagatctactgaatactagcattgatacagaagaagcaactaagcgatcttttgaaatacttcagcatattccaagtaatctttcaaaagaagataaggatcaaatcattgatttcattgaatttataaaatttaaaaataaaagggaagctagaaatggatactaacaagctaacagaattaagaaaagagattgataaataccgtccattagattctgatcagataagagcacttaacaaggatattcgagtggaacatatttggtcatcaaacgcgattgaggggagtaaaattgataagtttgagacagaagcaataattagtaagggaataacaattcatggtgaatcgataggagatgtattatcaactattgatttaaatgaagcgtacgattatatgctagatttagctagtcataggcaacctttatctcaaactactattcgtgatttaaatagattagccttagcaaaaactcatccagagtggggtggtgaatatagagcattagaagtacatccagctaagactgattttaatccgtacactgagccatttgatattagaccagaaatggataatttaattgaatggtctaggaaggctcaaaaagaaatgcacccagttaagtacgccgcagatctacactataaatttgtaactatccacccttttagagatggaaatggacggacagcacgtttgctgatgagtttggcgttgacgggaaacggctatcctgtagttaatatcatgcctgataaggaatcaagagaagaatatatggaaactttacttgattctcagaaaagacatgatccaactgcttttgaagacttagttggaaagtacactgaaagaactttaaaaaaacgaattcaaatcctgcaacttaatgaaaaaaataaagaagaagctagagaagaaactcggttttcaaaagagcaattgaacgaattagccagacgtcatcgaattaagaacaagcttagggaaagaaattaacatgctaaccatagcttaataaagatataagtagtattatttacaatataattatattatctatatagtgtaattatattatttaaatattatttgtaagctagttacataccgctttagaattatacaaaataatatcaaaatattattttgataaaagcataaataataaaatatttaacagcgattagaactgagcttgtaaagcttttagatctgttataattttaactatcaaatcacgcagctgaacttcagctgctttttctataaaaataaaatgaaagtagaaaactaaaatgtcgataaacaaagatttactaaaagagcaacttttaattttaggttttactccagtagatggagaagtaaatgtctattcgcgaaaattgatatttaataataaagtagtagatactgtcacagttgatttcaatgctaagtctacagggcaaatcaactggggaaatcccaaaacagtaggtcgattgaccagttctgatttaagtaaaccagaatatatggtgcaattgtattggtatattcgtttggttgaatcaggatattctcctgaaaacattgcaatcgaacaaccagtacaattaggtcataaagatggctttattgatttagtggtgtttacacctgatgacaagccttttatggcattagatgctaaaaattatggcacagaagctaataaatacactaaggctttaaaagctagtcaaggacaagtagctagttattatagattcagcacaaatctagaatacattggtgtaataagcgcaaaaatagaacataattcagttgagcctagttcgtatattgtaagtactactcaatggaaaaaatatggcagtccagaagaatatacgaaaacattagaaaataatttaactttaccaaatgtatttaggatagctccaaatgctgttccttataatgaaaaaaattatttattaaagccaacagatttaattgatttaaatgaggatactgcttcgcagatgtttcatggttttctaacaattttacgtaagcatggtatttctgataagaccaatgcctttaataaagtattaaacttgtttattgctaaaattgttgatgaatttaatactccagatgacaaagcactatctttccaaaactatatggggggggaatgaaccactagagactttatatactagaatagaaaatctatactcacaggggctgagagattttataaaaatatatattgatacagataaagatattaataaaataaaacagatattaaatatcgaaggtattaatgacgaatctgaattggttcatcgaattgaacatttgttaagtaaagttaatgcagattttcaatttaaagatgtttatgataatcaaacatatattgataacttaaatatattgaaagaactagtagatttaattgctccatataaacttaaatatgctaaaaagcagcagtttttaggagatttttttgagagcatactttcaaacggttttaaacaagaagctgggcaattctttactcctgttcctttagcacactttatagtttcttctttgcctttgccacagaggacaaagacaataatcagtgatgagtcatctcgtcaacttttaccaagaatgatcgattttgcttgtggaagtggccatttcattactgaatacatggatgaaatgcagaagattattgaaacaacagatttaaagcagctctctaagaagcaacaacaaaattttaaacagttcaaagataatccatttgcatggtcaaatcactatgtctatggcttagatatagattatcgattagtaaaaacatctaaagttagttcatttttaaatggtgatggtgacgctattattcggagagctaatggactggcttcttttagtacaagtgattattcagaagctttacattcagaaaatcatgaaaagatgaatcaggtatttgatattcttattgctaatcccccatatcatgtggacgaatttaagtctgaactacctaatttagaagaagattttgaattagggaagctaataactaataatagttctgaaatcgaagccttatttattgaacgtgcaagtcaattattaaaaacagatggattgatgggaatcattcttccttctgcaattttagatacagaaaataacatttacgttgaagctaggaagatgcttttaaaacgatttgaaattgttgctatcatgaagaaccctaataaggctactttttcggctacaaaagtagaaacagttactatttttgggaagagaagaaacgatgataatgttttaaaaatagaaaaacaaataaggaaagctcttaataatggaccagtaaacgatataactttaaatcatcgtgaaaattgtataagcacttacattgatcatgtttttggtaaagagtttacattgcaagattatacaaatttgcttgcaggaaaatatgaaggcgaagatacaatagttgataattataagaaagaatacaagagattaaaggactcgaagatttcatttagtgattatattaaaaataaagaaatagaaaatatattattctatgttttaacggataataaatctattattatacagactcctacaaatagtatgtcagaatcattgcaactgttagggtataagtttagtgaccgtagaggacaagaaggtatacattctcgctttaaaaactattcaattgaagattcaactttactttatggaaccaaagataaatacttagattatttagttaaaaatgcgtttctaaataaatttgaagataataatataaacgatagcttaaaaccattttatcgtatcaaaaaattaaatgaactaatcgcgtttaaagctaaagtgaaaagctataagataatgctagctaaggcattaactggaaatattacagattatggaaatgaaaaaacgattcctttacataaaattgctatcctaaaaaatggaacttcaattacttcttctaagataaagcatggaaatataccagtgattgctggcggacgagaaccggcatactatcataatgaagaaaatcgtagcgagccaactataactgtttctcaaagtggagcatatgctggatttgtatcttatcatgataaaccaatatttgcgtctgattgttttacaataacagctaaacctaattcaggttatagtactttggatttgtattatttactcaaaaagaaacaaaaacaaatttattcttttgcaactggttctattcaaaaacatgtatatgctaaagatatggaagattttaaggttccagataaaggtcaagaattacaagtagtgaataaactgattgcaagctttgaatctgaagtacaacgtcaaagacaatcagaaaatgaactaacagagttacagcaaagtttatttagcgatattgataaagtatataaaaatagtcagaaagttgatcagagtatttcaatgcttgaagacaatgagctagtaaaggttatgggcggtaaaaggatacctaaagaatatgatcgtgcaccgtttccaacatgtcattattatcctggcgttaaagattttgaaaactttacgataaacttaaaaacgtctgattgcattgatgatgtagtatttgaaaaaattaaacgctatgttctgaaggaaaacgatgtttttgtatcagcagctggtacgattggtaaggtaggtatggcacctaaggttaaaggaggtactatatctttaacagaaaatgcacatcgtattcgagttatagatcaaactaaattaattccaaggtttttaatgtatattttgaaatctcaaaatattcaaaatgctatgaattcattagtgacaaaaacagggacaccgaaactgtcgattgaatcacttaaaaatattgaaattcctattttgaagataactgaacaacaagagttaataaagaaatgggatcaacttaatacaaaaattaatgatatctacagtcagattaatattaattaatcctattagctagttaatcaacattagaaaagcagaacctacaatataacttaggttctgcttttctttttggttctttcgtttatccgattaaataggcttgcaatattatttaagtattgcttgctaaaatacttttgtaattttgaaatagcctcaaagtaatatagaaaataatataatatttttttcattaaagctttttatattattttggtaacataaatgtactataaaaatattatattcataatatttttatatagatgttgatattatagaaaaaacataaatatattttttagcgttatttgagtaaagaaaaaacttgatactatgcaactttctaggcctaaatcttctaaaaaatcatattcacctgcatattcataatttttaacttgttctaacgcttgatataatgtttgatctaattcacttctaccgatacctaaagttactagcattttagatcattctcttttttgcatttttacaatattattctagtattatttgattctttcgtttatttgattaaataggattgcaacaatacttaaggatgagaccgtaaaatagtttgtgtaaggatgaattattccttaatttaatttcctaaaacattagaaaaaggagttcctttctcgtatgattggtttgaacaaaaaaacatacagaaagaagaactccttcatgaatgattttaccaaaaatataactcaagctctattcaatcaagataaaattaatgatttgcttcgtcatgaaatccaacaagctgttaatgacatgttagaatctgaactgactgcctttttaggatatgatccctatgctagaaatggctggaatactggtaattctagaaatggtgcgtatttccgtaaaattgatacccagtttggatcaattgaggtacaagtgccacgagatcgcaatggtatgtttcatcaacacactctgccagactataaacaacatactgatctcttagaagatatggttataaagctttattctaaaggtgtaaccactagagaaatagctaatttgatcgaaaaaatgtatggcagtcattatagtccagctcaagtgtctaatatctctaagcaaatgattcctaaagttgaggcttatcacaagcgtaagctgagcgataagttcttttgtgtttatcttgatacaacgtatataccgttgcgtcgagaaacttttgaacgagaagcagtatatattgccattggcatcaagcctaatggtcacaaggaagttatcgactactgcattgcgcctagtgagaatattgaagtctggacggcgttgctccagaacatgaaatctcgtggtttaaagcaagtagagcttttcctttcagatggcgttgtcggcatgaaagcagcactggcaaagacctatcctcaagctcatttccaacgctgcttggtccatgttatgcgcaacatctgcgctaaagtacgcgtggacgatcgcgaggcaatcatgaacgaattcaagcagattcaccagcaagccaataaagcggctgctgttgatgtattgcatgctttttatgccaaatggaacaagagctacaatcgtgtcattagaaacctgaaagacatcgagccagacctgcttgttttttataattatcctaagcagatcagggcttcaatttactctaccaacatgatcgaatcctttaataacgtcattaagcgcaaggctaagcctaaagcggagttcccgactgaacagtcgcttgatacttttattggcatccaagcaatgagctacaatgaccgctacttcaaccgaattcacaaaggctttggtcaagtccaggataccttagaatcctattttgaataaataaaacgttaaaaaaacaatttacgagaaagatctatttacacaaaaaatttgacagtttcttaaggattgtttattgaagcatttttatacttttgaaataatattaatgtagcataaaaataacattttcaaaatataattattatattttggctttattataagaaaaaagccagcttatgccgactttaaaattaatgcttatataaatcaaatttaggatcaacagcgagaatataaaaaatattatcacttatttttccaattacgcgaccttttttacttaatctataatctcttgtcttttaggaaaatgatgattagaaaagttttggctacttgttatcttcattaattacaaaaacatccttgaaatagctctttattttgtcgtcactaataacctcactctgttttgtctctttccaaggtctttcactatgagtttgacgcattaaatcataggcggaactatgaccatatatatcataaatactatttaaaatgtcagcagtttgactgtcactctgtaattcacgatagtcatttaaagactgattatcaacataacctacaatgccacgttgatgaatatatttattatgaacagattcaacagcaggaccatatttccatgcaacaatgtcatctttgaacattctatgaccagttacaactaaacttgccgcttgaatataatacagtaatttcatagccttcatttgcgttaattcttctgcatttggatcggcttgtaaatcagcattatttctaactcgtagccaattgactattttaaaaacgtcatacataatgcttcctccattaaaatttcttatcttggctttacattttattacttttaatatacacaaatattcaatgtttgtgtattctatcctatcacatactctcataagctttcatttgtttatatatcggttgatgaaatattataaagatttaatcttcatgttagacttcttaatattgcaaattaatctgagtatcataactataaagatgatatttacttatggcaaaaaataataagaatatattatgggcgtagtgtattaataagataataatcgtatttaactatggctaaaatttgataaacatattattaaaataatacggctatattactgctatctgaatattaatattatgcaaaaggtataaagatagtatttttgtgcaaagaaaaagcctaaaaagcttgatactatgcagctttctaggctttattctgttataatttaaatagtgcaggtcagaaatttcgcgaacctaattcataacaaagaggtgtcctttacggaaactttttgtcaaagtgctggttggcagcacacttggacctgtgttgggatagtagcactaagctaatttaccaacctgactatcgaacataattattttcgataccagaagtaattatagcatgaattagctatctgataaagcagtcaagaaaatcttgactgcttttttactagattttaaagtgttgtaatttaaaattgcataatcccagtgtaaacatattttgttattataatgtctagatagaaaattataaaaggatagaacagtttaacctatgaaacaaaagactttattaacaaaagattttcaaaaaataattaaaaagcagagacgctttaattctaaagacgtcaatgttctgcttagtaaattaaaaacaagtgtggtagagaaggatgtcgaagatgcgtggagagaattttttacaacatgctttgtcaaaaataaaactgatgcaaatgatgattttactatttcctctcctgaaaatgtagatggtcttattatgagtgataacattgtttttgcattaaaactgctattggagtttaagaaagataccaatttgaataaagtttatgatcgggcacgaataactgcccagtgcattcattatatgcgactcctaagtgataatgacagaattagaccaaatgtaatttgtggtgcagatcaaagtaaagcatttgtattatacgcaccaaacttttatgattatttaaaacataattataattggaaatgtcgtccatctgatgcttatagacaagatcctcagcttatgaaggatctgataacagatagaaatttatctgtatgggtttatgaatttgactatagaaaaccaaaacaagcctacattaacttacaagagttaatagatgaaattgacaaacttgctcaaacaaatggtaatcaatatcaagttaaagttacagacgcaaatattactggtatgttttcagaattcaaacgtatagtttttaataatcctgatgaagttactgcaagggaatcagtaactatttttatgaaattactaattggagacaatacagactactatttacatcctaataagttcaatgtacttcatttgcccaatggcaaagaaatcagtgtcgatgctattgcattaaaagccttttttaaacattttaatcgtcaattgaaacctaaagaacaagatagattgctatctattgcagatagactgattgaagatgaaactagaagaagaaaaggtgatttctggactccaactatttgggctaatgaagctgacaagttgttgcaagatgcttttggtaaagattataaagaaaacagtatagtatgggattgtgctgcgggcactaaaaatttaacgcgagattttgtatattctgatttatactcatcaactatttatcaatcggaagtagatcttggagaaaagtataatccggaagcaaaagaatcatttcaatatgattttttgaatgatgatattgacttaaatccagagagtaatggtgaaaaatggaagttacccaagactttatttattgctctaaaagaagctgcaaagacaaacaaaagagtcatattttacactaatcctccctatggaacagccaacaatttaaaaaaatatggcacaagtaaatccaatattgctcaaagcaaaataaatgcttacatgaaaaagaacgattatggaagtgctgctcaacagctatatgcacagttttttgtacgtgttattaagattgtgaatgattttcacttaaaaaatgtaggtattggattttttactaatgctagattttttgcaggtggtaactattggcaaaaatttaataataaattctttagtaagtttaaatttattaaaggtacaatgcttaatgcaggagaattcagtgatacttctaatacctggcctattgtttttgctacttacaaatatcaagtagggggggggagacgtacctgctatagacaaagtttcattcgcactaaaaaagtctgcttgggacgaagaaaaaggtgaattattaatagaatcagtcaacaaaaaaattaagaataaaacaatgctacaagtgtataaaccaaacgatctttctagttgggttagagaaacattaccaccaaaaccaagctattgtttggatacgtatccacagttaagtggagcactggttgaaagtaaaggaaaaagaccaagtgggaaattacttaaaaattcgttgggctatatggtgtttaattctgataatatcggtgaaggtacaacaaatggtggtgtatggatagcgtcttctagtgcatataaaggtcatggaattaatgttttaccagaaaattttaaaagagtggttgttggttttgcagctagaagggcagtaaaaccaacctggtataatgctcaagataactacgtgagacctgatattaataattcaaaatatgatgaatttgtaaatgattctttaatatattctctttttgacaatgcaagttatcaagcagcatatcgaaattggaaaaattatagtaatttagccaattttaagaataaatgggccaatcaatggttttggttagatattgatacagtcagagaattaactaatgaatataatcagatgcaactttataatgatacacgtggcgatacaaatagatatgttgcaaagatggtcaatcaaacaactttttcacctgaagcaaaagctgttttagatattgtaaataagatatggcttcaaacattgtcttgccgacaatctgcaatactagctaatgagaccttaagccttgaagcgtgggacgcaggctggttccaattaaaacagcttgttaaattatttccggataaaaatcaaatcttgatgttagaatttaaggaaaaattcgaaattttaaaaaagaagatagaagatgaagtgtatgatttaaacatgctatcaaggtaattaatgatggatactgttaaaaagatctaccaatgaacgcaaagaaaaaaagcctagaaagcttgacattatgcagctttctaggctttattctgttataaatttaatagtgcaggtcagaaatttcgcgaacctaattcataacaaagaggtgtcttttacggaaactttttgtaagtgtgctggttggcaacgcattggcctgcgttgggatagtagcactaagctaatttagcaacctgactattgaatgtaattacatcaatatccagaagtaattatagcatgaattagctatctgataaagcagtcaagattttcttgactgctttttgttgctattaaaaagtaatatttatatataattagccatttgccgacttgattatttatattcttcttgaggaaaaaacttattgtttttaaaatctctctgattatattttttactgctatataaaaaatgatgataatctatgaatagtggataaaaaataaacatatcagatgtgaccatagaaccaacgatccgtacatttcttgcattttttgcactaatctgccataaatttacatcttcaccaatgtcaaggttatctatttttttgataatctttttagcagtaattaatttatctccttctattttatgacaatgctgatatttactagtaaaaatatcttttcccatttcctcaagatcggggaaaattttgctaattataaaatagaatttctttgctgcctcgttttgatcttttaagctattaacaaaatatttttcgtttattgaatcaatccaatggggatattgagtaaaatcaatataaaacctatcagaaaaatctttgtgcttaggttgagaaatattttgtttaggctttgttatattcctaattctttttttagacaaataattatcctgcctgtttaatataatagtcaaatatatctttatcacttattgtgtttttgcctttttgcaaaggggataatccttttcttgcattaatccaaggatcttcttgatgagtcatactctcaagctcattagctgaatatttcccataaatatcccatacttgctctaatacattttctacatcttctgtaaacacaggaacatcaggcttttcatcaattgatccaaatccataatcagcgtattcagcatataagcgtaaaataactggtccatggacccaggcttcaaaatgatcatcaaacaatttgttatctagatgatctctatcctcatttagtaatgtaaggacccatgcatatgcataatatactaatttttgtaatttttttggtgaaatatctctattaccatgagctaaaaaccaagctgcaacttcttcaacggtatattttggcataatacacctctctattctggctatttgtttcacaattctctactttcaatatacacaaatatttaatatttgtgtactcttattatcacataatatcatataacatcatttacttacatattaattgtgaaacattataaagacttaaccttcgcaatatcacacattaatccgattatcataaccataaaaatatttttataatactactatacatattataaatacaatataaaaataccatatttatagcagcataacgataataccattgtactaatattaatatttattcaaaaaatataaaaataatatttagatatgattttgagcaaataaaaagcctaaaaagcttgatactatgcagctttttaggctttattctgttataatttaaatagtgcaggtcagaaatttcgcgaacctaattcataacaaagaggtgtcctttacggaaactttttgtcaaagtgctggttggcaacacacttggacctgtgttgggatagtagcactaagctaatttaccaacctgactattgaagtaattacctcaatcttcagaagtaattatagcatgaattagctatctgataaagcagtcgagattttcttgactgctttttgatgctatttaacgtagttagaattatagtactttttatattacgctaaaaaagataattgtagtagtttagtattattttaataatatcagaactatataacaaatggtaaagcaataatatttttaaaacataattattatatttgaatcttattatgagagggcagcttattctagctcttcttatatattgttgtggtagtattactacattttactaagttaacagttaagacattatcacttgttaatcacataaaataagattggtataccttaaaaattgacctctgcaggctttttctagttcagatctaaagccacccaagtgggtggcttttttaggtgtttattttatttttttgctatgtacttttaaccagtcggcggcgaatttcataatttcttctgtatcgtcattattagtaacgtaaagaataaattttagcccctcatctttggtgtaatctaattcatagccgtttttaaacagaaaaaaggtggcagatgcaattgctgttcttttgttaccatctgcaaatatatgtttttttgtaattttttgtaaaatgaatgcggcttttaaccatatggtaggatatagttcatgtccaaaaagcacttgtttaggttgctctgtgattatgtctaaaccttctggatactgtacgccggaggtgtttttagtagatctttttattacttcattattgatagcaataaaagttaatttattgatgtagtacattatttatcttctaattccttcattaaatccccgtgtttttggtaaaacttatccataaaactatctaatgaaggatcaactgatttcatttttttgaagataattttttcaccatttggatcaattattttttcaaagacagtattttgatcagcatcaagcgcttttctatctttgctggtaactctaaaattccatgaattccctgctttgaacattttagtttcattttttaaggcattagtttgcataataaaacctcccattttgttataacgttattataccatgtaatgacataatgagcaacgattatattttcagggagccccgtagtcaggattttcttggctgtttttttgatgctagtaaaagtagagtaatatttctaactaggctttttgtagatcatataatgcttcagtagcaacttttgaaacattaattttattcttcttagcccattcatttaaatcggcaggaatagagatgtttcttctaacggttttaccatatttattgagctatctagtcatgtttaccgatacccaagaagtttgttgacctttgtctaaagtccattctctaggatcttgaacttcaggacgttctaattcatttgctagcatcgttgctaaggcatctttagcattctctaaagcttcagggatagtttcaccatctgtgaccattccttgaatattaggagatgtaaccacatagtaatgccctgattcatcgttatattcagttaagactactggataagtagctatatcttgtttcatgaatacttggatacgccaaagcaagcgggtatttcctaatcccgcaaggcatatctttcctcctttcataatgtataaatatataataaacaaaattttgtgtattatatataaaacgaatgaaaaatcatctttttgatgaaacaaagatgatttaaatagtattacaatgcttctaaaaatatttttttgatattatttatatagtatttacacaatataatttaaacattaaggcggatttaaaagcgaagaaaaagcctagaagatgcggtgtatggcaactttctagactttattctattataatttgaatagtgcaggtcagaaattttgcgaacctaattcataacaaagaggtgtcctttacggaaattttttgtcaaggtgctggttggcaacgcattggaacgttcaaataaaaattagtaaaaatatattgacagatgtgtctatatttgtttgaataagggtgcagttaatgtgtataaaaactgtacactcgtgtacccgaattaacgtttaagcgatatgtaatatcgtcggccacggggccgccccttacattggggcggtttttttggagaatataattgaaatatttgtttattctgatgaatcaggcgtctttgataaaatacataatgaaatttttgtatttgggggcattttgtttctttcaaagcgcgataaagatattgctgccagaaaatataagcatgttgaaacaataatacgtactaatgaacataaggataattcttgtgaattaaaagctacaacggtgaaaccaaaagatcgaaataaaatttacagatctctaaatggtttagaaaaatttggagttgtagttcatcaacagagaatattagaaaatatttttgaaaataagaaatcaaaacagaggtatttagattatgcttataaaatctgtttaaaaagaaagttgcaacatcttatttgcaatcaagatattaatcctcaagaggttactgcaattcatgtatttgctgatgaacatacaaccgcaacaaatgggagatatgaattacaacagtcattagaacaagaatttaaacatggaacctataattggaattattcaaaattttttgaccccctttttccgaatttaaattatcttgaagttcattattgtaattcagagaagattacattgatccgtgctgcagatattactgcaaataaactttatcggagcattcttaagaataaagaacagaatttaaataaacataataattttcatatcatacatttaccttaattacattaaagccactctggagaattttttggagtggcttttttgcgtactgtataatgaagataaaacttaaggagtgtatttaaatgaggaaagaaagtaattttagtaatgtaaggccccatgcatatgcataatatactaatttttgtaatttttttggtgaaatatctctattaccatgagctaaaaaccaagctgcaacttcttcaacggtatattttgacataatacacccctctattttggctatttgtttcacatttctttacttttaatatatacaaatattaaatatttatgtactcttattatcacataatatcatttgcttatatataattgtgaaacattataaagacttaaccttcataatattgcacattaatatgattattatagctataaaaataatatttatttattataaaaatagttttttaatattactttatacattattaatgtaatatataagtactatatttatattattcagacttgactaaacttgaaaagggaaactgtcaaattttttgtgtaaatagatttttctcgtagattgattttttaatcttttatttaatcaaagtaggattctaaggtatcctgaacctgaccaaagcctttgtggattcgattgaaatagcgttcgttgtagctcattgcctgaatgccaataaaagtattaagcgactgttcagttggaaactctgctttaggcttagctttacgcttgataacgttgttaaaggattcgatcatattggtagagtaaattgaagccctgatctgcttaggatagctgtaaaagactagcagatcaggttcaatctctttgagatttctgatgacatggttgtacgcgctgttccacttgtcatagaaggcgtgcaagactttgatcgcggcttccttatttggctgttgatgaatttgcttgaattcattcatgatcgtttcgcgatcatctacgcgtactttagcgcaaatattgcgcatgacatgaactagacagcgttgaaaatgagctttcggataagtctgctccagcactgtcttcatgcccacaacgccatctgaaagaaagagctcaacctgttctagaccgcgagacttcatgtcttgaagcatttccgtccaattctcgacgttttcgctgggagcaatgcggtaatcgatgacttccttgtgaccattaggcttgatgccaatggcaatataaactgcttcacgatcaaaggttatgcgacgcaaaggaatgtaggtagcgtccaaataaacgcagaagaacttgtcactgaatttgcgctgatgataggcctcgacttttggaatcatctgcttggagatgttagatacctgagctgggctgtaatgactgccatacatcttttcaatcaagtcggctatttctctagtggttacgcctttggaatatagcttgataatcatgctttccaagacattggagtgctgcttgtagtcagggagcgtgtgctgatgaaacatgccgttacgatccctaggcacctgaattttaatctcgccaaattgcgtatcaaccttgcgaaagtaagcaccattgcgtgaattgcctgtattccagccagctctggcataaggatcatagcctaaaaacgcagtcagttcagcctctaataggtcattaactgcttgctggagttctttgcgcaataaatcgtttattttgtcttgattgaatagagcttgtgctatatttttggtaaaatcattcatgaaggagttcttctttctgtatgtgtttttttgttcaaaccaatcatacgagaaaggaactcctttttctaatgttttaagaaataaatttaaggaattattcatccttacacaaactattttacagtctcaataaatttattttttcaattaacttattatagttataaattacttattatttatgcaaaactaattttcttaatcttatcgtactccttactatttgctaattcagcatttcttagctcaatatcgttttgaatatttaaaaagaatttaggcgatacaccaaataattttcctagtctgacagatgtatcgactgtaatctttctcttatcatgaagaatatctaaaattcttgaactaggcacatcaattgcttttgcaactgcataagcagataaatttaatggcttcataaattcttcacttaacacttcacttatttttggagttggtatagtattctttagcataattcttcctcttttatatactagtgataatcaacgatttctacattataaaaataattgggtgtttgaacagtaaagcaaattcgatactgatcattaatggtaatgctatattgtccttttctatcaccttcaagtttttctaaatgatttgctggtggtattcgtaaatcgttaatatcatgagcagcgtccatcatcacaaattttctaatagctatcttttgaatattttgtggtaatttttttgaaaatttttgatgataaactttttccgtttccttattagcaaaagtttgtatcattgctttctcctctatcttttctatgttttaattatatccgatttgcatatatatgtcaatcagatagagtggagctatatgtgtaacattagggtgtacttaatgttacttccataaaacaaaagggctgcctaagtgtaatactgacaacctctttactataatcttatgaactaggtgaacattttctatttgccctgaattaattctacctcttactaaatataatttatcttttacgtttatttttataaaaaagaaacgtaaaaggtaaaacatttttttgctttgagttaactgtttttttattaatattactaaaatattttgcaacttttttagcttcattttttgatgaataatctaacgctttattttcaaaaactattttaattatttcacgaacatattcatctatctttacagaaacagcagatatttcattatctgaataagtgattttattaccatgagtatgcttggatctaattctaaatgctaatttaaaattttgtttaactacatctttttcattttcaccactaatttttaaaatattaatagctgttgatgcaagcatcttctcaatttgggtacttctattaccttctaaggcaaataaacattgtagcgcttgcatatagaagtcaattttaaccggtaattgacatgttcttctggcattttgaaccgagcgtatcgttcttataaagctagactctttactacgatcagttacatcatagtttctaataaaactatattcactattatattctggatttggtatattaccacctacttttgacattattggatataacattttatagtaaaaattaacctgttgattttcagtttttgttaaagctatattttgaggatgaccattagccatagaatatggaatatcaagttttaccgagcttatatatccaatactactattaatataaatattattagtctgtacgcatgaatccttcactaaccacattgctgttaagaatatgattattcgattccttatttcgttcaatggatagctgtaaaaatcattaagtatacgtgttatctcaaactttgaaagacttttaatgcttttaataatttcctttctttcctttgaagatagcgtgatactaaaaatataacaaggcttactacacacttccatatatcttaaccgaccataatcttttataaaattatctttctttactttgttattttgaaataacttaataaggatagatatagccaatcgcaatgaagtctttgcacttgtcaaacatgctgtagctaatttatgtgatttagcattatatgttaataatgctgggatagctttactgattctgaccctaaacgtgttgaacgtttatttgatgtaaatcttaaaggtacatactggggtattcaagctgcagctaagcaatttaaaaagcaaggaaaagcaggccggattattaatgcagcatcattggctggatatgaagcttctgctttgcaaagtgcttattctgtttcaaaatttggaattcgttgcttgactcaagctgcggccaaagaattggcagtagataaaattactgttaatgcttataatcctggaattgttcgcacaaaaatgcgagatgtaattgataaaaaattgcaaaaattaaacatgaaacaataacgcaacaacaagcaaattgtctcaaagagatagtgcttggtcgtgaagcaaaacctagcgatgtagctgaagttgtggcttggtttgcttcatcaggtgctgggtatgttactggacaatcacttcaagttgatggtggaatgagatttcattaaaaaaacatttagaataaataattttgtcaaaaaagcaaaaataacacctacattatttttggaagataaaataaatttgaaaataattttgtattatcaaaacggcttaaccacaatatatcgattataaataaccccaaaaatccacatgttgtattattgagcagacgatgctatagtatgtttacacatatattagataaaacaataaataatgataggagcaaatatatgagttattatgatcattcacagtcaccagttgaatttgcttacaatgacaacggcaaaaatatgcgagctattaactggaatgacattaaagatgataaggatcttgaggtttggaacagagttactcaaaacttttggttgcctgaaaaaatcccagtttcgaatgatataagttcttggaatcaattatctgatgactggcaacagcttataactcgcactttcactggattgactttattagatacaactcaatcaagtgtgggtgatgtagcccaaattaaaaattcacaaactgatatagagcaagctatctatgcaaattttgcttttatggttgctgtccacgcaagatcatatggaactattttttctactttatgtactagtgaacaaattgaagaagcgcatgaatgggtagttaataatgatgctttacaagcaagagctaaagcggtaattccgtattatacaggcaatgatacgcttaaatcaaaggtcgccgcagcaattatgccagggttcctgctttatggtggtttttatttaccattttatttagctgcaagaggtaaattgcctaatactgctgatattattagattgatcttaagagataaggttattcacaattattatagcggttacaaatatcaattggccgtaaagaaattagctccagctaaacaagcagaaatgaaaaaattcgtttttgatttcttagataaactaattgatttggaaaagaaatatttgcacgagctttatgatgattttgatttggttgatgatgcaattcatttcagtttgtataatgcaggtaaatttttacaaaatttaggttatgatactccttttaccgcagaagaaacttatatttccccagaagtattcgctcaattatcagctcaagctgatgaaaaccatgatttcttttctggtaatggttcttcatatgtaatgggaacaggagaggagactaaagatgatgactgggatttctaaaaagccattagttgtctattattcttccacttcaaataatacagcacgctttgtagaaaagttagattgtaattctattaggattcctattaaactcagtaaagaaatttcagtttctgaagaatatattttaattacgccaacttattctggtggccatgggactacaggtgctgtgcctgagcaagttatccactttttgaacaaattggctaatcggcaaaaatgtattggtgttattgctagtggaaataccaattttggtaattcttttgccttggcaggggatgtaatttctaagaaattacatgttccttatctatataaatttgagttactgggaacaactgaagatgtaaataatgttaataaaataattgctgatgcaggtgaagacaatgactgatcatcttaataatgattcatatatttctttaaatgcacttgctaaatttaaagatgaaaaaggaaattataattttaaagctgacaaggaagctactaagcaatatcttgaaaatcatattgaaccaagaatgaaaaagtttgcttctttagaagaaaaattagcttatttagttgataataattactatgataaaaaagttctagatttatatacagctaaatttattaaagaaattttcaaattagcttatgcacaaaattttagctttttgaactttatgggtgcagctaaattctataaagcatatgccttaaaaacaaacgataataaacaatttttagaacgttttgaagatcgggctgttatgaatgctttatttttagctgatggcaatgaagaactggccttgaatttagttaaagatattattagtaatcgtttccagccagcaactccgactttcttgaatgcaggtaaaaagagacgcggtgaatatgtttcatgttatttgctcagagttgaagacaatatggaatcaatttcacgagcaataagcacaagtctgcaattatctaaacgtggtggtggtgttgctctatgcttaactaatttgcgtgaattaggtgcacctattaaaaaaatgaagaatttatctagtgggataattcctgtaatgaaattactagaagattcattttcttatgccaatcaattagggcaaagacaaggtgccggtgcagtttatttaagtgcccatcatccccagattctgcaatttttagatactaaacgagaaaacgctgacgaaaaggtaagaattaaatctttatcacttggcgtagtgattccagatattacttttgaactagccaaagaaaataaaaagatggctttgttttcaccatatgatattaaacgtgaatatggtaaaccaatgtcagatatttcaattactaaagaataccaaaatctccttaataatccatgtattaaaaagacatttatcagtgctagaaaattcttccaaactattgctgaagttcaatttgaatcagggtatccttatattatgtatgaagatactgtcaatcgaagaaacccacaaaagaaattggggcggatcgtgatgtctaatttatgttcagaaattgctcaggttaatacaccaagtacctataataaagacttaagttttaataagacgggctacgatgtttgttgtaatttaggatcacttaatattgcagcagcaatgaatagcgctgacaagttaggtgatttggtttctgatagtgttcaagctcttaatcgtgttgccaggtcttcagatttagattgtgctccttcaattgaaaagggaaataaagctaatcgagcaatcggtctaggagcaatgaatttacatggctttttagcaactaatcatatttattatgattcaccagaagcagttgaatttacaggaattttcttttatacaattgcataccatgcatttaaagaatcaaataaattagctgaaacgtatggtgcttttaaaggattcaaagattcatcatatgctagtggtgattatttcaaaaaatttattgatgaagaggtttcaccgaaaacagacaagattaaagaaattgtagctaaatataaattagttattccaactaaagaagattgggaagaattgattactaaaattaaaaagacaggtatagctaatgctaacttattagcagttgcacctactggatcaattagttatttatcttcatgtacaccaagtttgcagccagtagtagctcctgttgaaacacgcaaagaggctgatttgggtcgaatttatgtaccagcttataagattaataaagacaattatgagtattacgaaaagggtgcatatgaagtaggacctaatgctattattgatattacagctgctgcacaaaaatatgttgatcaatcaatttcgttaactttatttgttgaagataatgcaacaacaagagatttaaataaggcttatatttatgcctttaaaaagcgctgcaactcaatttattatgttagaataagagaaaaagttttagctggtagtgagaacttgactgcagacgaatgtttaattcaaaatggtgcagaatgccagaaatgtatgatttagtttaataatagaaaagcagctaaagtgtgatatgaaccccgaaattcggacaagaatttcgaggtttttatttatgtctaaattatccaaacaagataaaattgatatttacaataattggaaaaggtcgatagtaatctattccttttatatgtatgtgttcattagttgaaatttttagtagaatagtatctaggttcagtaaaacaggtagctcctgttagaacttagtaactttagtatggctacacactcctcaaacaattaaagttacggaggtggaagcttatgcaaaattgggtagactggagagttagactaccaagtgatagtagtagccgtagcactaagtattttcttaggcgcgctaggtatttttattattcgtgtagctattgcatatgcgataataaaaaaagctaatcacaaggattagctaaccaaacagtcatcttaagttacgattggagttagtgagcgcaattcactagctccttttcttttataattatatgtttttttaaaatagttgtctacttttttgtcataatttggctcccgaatttaaaattgcagtgcaacgctaagtgttaaacaaaaaggccatgaagacctaaacttgaagtgacgaaaaatcaaggaaggtgaatcttcatgaccaattcaaattctagcatctctagacattatcatcaattaaatagtgtacaacgaggacaaatacaagctctgcttgatttaggcataacctccccgctattgctcgagaagttggctgtcacaaatcgacaattagccgtgaaatcaaacgtggcagcgtcctgcaaagagatcataactatctgctctatgagcattactatgccgatactgcgcagatctatcatgataagcgacgcaagaactgctataagcgtgatcagttaaagcattatgctgtttttctgaaaatgctgtctaagcggtttaaaactaaatttgatgctaccagcattgacgagtttgtgggtgagttcaagcagacgatgccaggctatccttgccccagcacgactaccgtttatcgctatattgatcgcggtttgctagatataagcaatattgatctgccaatgaagcttaaaagacgcagaaacaaacggcatcatagtcatggtgggcatgctttgcataaaaataatcttggcaattcaattgagcagcgtcctaaagaagttgaagacagagcaactcctcttcactgggaaggagatttggttaaaggcgttagacgtaaaaatcagcctgctttgatgactctgacagaaagaactactcgttttgaaattgtcatcaaaataccagattatcgagcaagtacttgtcaaagactgcttcaaaaagaaatagaccagcatcctgattggttcaagactattacttttgataacggttctgagtttgcagatatgactaaaattaaaaactgtcagatctactttgctcatccatattcaccttgggaaagaggcacaaatgaaaactgcaacggtcttctgcgtcaattcttccctaaaggcaaaagcatgaaagataagacagctgcatatgttcaacaggcaactaatgccattaaccacaaacatcgccgaatcctccaatatcacacagcagaagaactcttcaagcaatatatctcttcataacctaactgttgcacttcaattttaaatccgggaaaaagaagaaataataactggtgcggagaatattattgcaatttctgattgtattcataataatttcgaattaattaatttacaggagcattcagaattaaatggttatagattttgcaatttaccattaaaactgcaaaggcaaatgtgtaatagaatagtacaaatttcacaaaagcaataaaactgcaagttatgcatgcaataggtgcagaatttgcagttatttatttggctaattgaactatttatgaaagcaattttattttactatgaatgtgatgaatgaagtgggaagtgaaatcagattgagttttgtaaaagatggtttagtatttgcacaattagatgttagtgattctaccgatgctatttctacattagctgatcagttattcaagcaaggttttgtgactgaaagctataagcaagctgttttggatcgagaagagatttttccaacaggtttgccaagcggtgaaggtggcgtagcaatcccacatactgatgttaagtatgtgaataagccagttattgcatttgctacattgaaaaagccagtgtttttcaaaaatatggctgataaatcaaaagatgttgaagttagatttgtagcaatgctagctatgaaagaacaacatagtcaagtgcaactattgcaaaagcttatggaaatgttccaagaacaagaactaatgtcaaagcttgtggaatataaagattcaaaagaattatatgatgcattagcatcgtactttaactaaaagggagtggaattaaatgaaatatgtagttgattttatccagtatatagtcaaattgggaccaacagtaatgattccaattatctttttgatttttgggttatgtttgaaggtaccttttgctaaagcacttcgaggcggcttaatggtcggaatcggctttataggattaaatgcaactgttacaatattaactgatgttatgaatccagcagttcaagaaatcattaaagtcatgcatatcaatttgtcagttattgatgttggttggccttcagcatctgcaattgcatatggttcaattgtaggtgttacaatgattccattgggtatcattatcaacatgattatgctgtttaccaaaacaacatcaaccattgatattgatatttgggacttttggcactttgcttttacaggttccttagtatatgccttgactgatgacattttgcttagtcttttcttagcaagtgtaaacatggtcgtaatcatggtaattgccgacagaactgcacctttgtctgaaaagtacttgggattaccaggaatctcaattcctcatggatatgcaggttcttttgtaccatttgccgtagtaattaattggattattgataagatccctggtgttaacaagattcacttggatgctaaagactttaacaagaagtttggtaactggggtgaacctacacttttaggtttcgtaattggtttgttagttggattcttagcatatggctttgttcctggtatggattggccagacaaaataggtaagattttgttaatgggtgtaactatgtcagccgttatgattatcaccccaaaaatggccgcattattattacaaggtgttgtaccagtatctaataatattcaaaaattgactcaaaaacgctttggtggtagaaaattctacatcggtatggatactgcagtaggtatcggtagtccagttgtattggcttgtgctaccttaatgattccattatctttggtatttgccttcattttaccaggcaataaattcttaccaaccattggacttgttggatttgtcttcatgttcccattgattgtggcagtaacacacggcgacttcttccgttcctttattattggtgcaattaacgtaatcattggtttgtggattggtactaacttatcaccattctttactaaggctgctagagctgctcactttgctattccaaagaactcaacattaattggatcaattgactatgaatctaatcctttcccatggatattgttccaaatggcacacaataagtggcttgcctatgttattggtattgtagtttgtggtatcttagtaatatggaaccgtcactgcattattaaggctgaaaaagaagctgaagcagctaagaaagcttaataaaattaggaggatttaattatgaaaaagattattgtcgcatgtggcgctggtgttgttactagtacagcagccatgaataagttaaacgaagagttaactgatagaggctttaacgaaggtactgattacaaattagttcaaacaagtgtacaacaagtacaatcaatggcagatgaagcagatgctgctattactactactcaatatgacaatgatgaaatcaagattccagttttaaatggcttgccattattgacaggaattggcgtagatgacgttattgatcaagtagaagaaattatcaaaggttagtttaaagagttagaaatcgttaaggcaagtattttagatattgtcttaacgacttttttaggatatggataatagatggaatcaattgacacccgcaatttaattaattattttgctgagcaaaaaagatatgtgacgttagatgaattatgtaactatttcgatgtctcacaacgaacaatcttttatcggataaaaaaggctaatactttattaacattaaaagatattacccctataaaaaatgttagaaatttaggctatatactcaatgcacaagctataagtgcttggaagcaacaaaacatcaatgaaaataaggaccttcaacataacgaaaataaacaaaacagattgaaggaaattatctggaaattttttattcagaatagtccaataactattaatcaattaatcgatgatatggatgtctctagaaatacgataatagatgatttgaaggacattcgacaaaattatcctgaactgaagctaaatattgactcaaatggtcatctactaaaaagttctgaagaagagaaaagtcgttttattttcaatgagctgcaaaaacataatagtggattaatagcacacaaaatagataagttaccatttccaattattgaagattcaaaagtaaaaagtgatatagaaattctcgaggaagatatttcctcacgatttaccgaaaacgctatttctaaattaaagagaattcttaaatttagaatatggcgaatttctatgggaaatatgattgttgacatagatataacagataatgatattcaagagagtaccgttaatgttttatctgcagttacagactttacgcaaagatatgggattggaattaaaagtgaaattttattttttagtgaattaattctttgctcgcaagccgacgtagttaattacgttacagaatcttttaaagacaaaattttagatgtagcgcaagacattgttaatagatatgcttctatttcaggcataaaaattcaatctccaaagtttgtaatagccttaattaatcacttatatgccagttattttagaagtaagtttaattttgactttaattctgaagctttatctgatgttgtccataaattcccagaaatagttaagtttgtacaattatcttgtagtccattagctaagctggtttctaaacctatttcaattaatgaaattgctttgatcagtctgtacttcatttcatacgatgatctatcagataatatatctcatgttttagatagaaacgataatattagagatagcttgcaatcggaagttctcttagtatgtaatagtggcgtaagttcatctgctattctttattctaatttgcacaaacaatatccattaatcacattttctaagtcactaagtatcgatgaattaaataaaattttacgcatccctaataccgctaaattaatcattacaacctttccattaaatacaaaaaatattgatttacctgtagtccaagttaaggcaatgatggacagtgaggattatgtaaaagttgagaatcaattaagatactatttccctcagttattcattaatagggaaaagactttagataatttgattagcattattcaaataaatgctcaaataaagaatatttctgatctaagaaaagatttagataattatctatatcctacaaaagatactgttaaacgtgataaaaataaacacaatttgatggatcttctgaatagaagtagtataaaaatcattgataatctaatgaatggaacggatttgaatcctattattaaggagctatctgaagagttagaaaaaaataatatagttacttctggttattgtgatgatatcttgagtttaattgataaatatggcccatatatgttgctttcatctgatacattcttagcgcacgcagcaccatctaagcatacaagaaaaataggaattgaaattggaattctaaaaagacctattaaaatttccgttaacaatatagaagaaaaaataaagtgtgtcattgtacttgttcctggctttcaccaggagcatgataaggcactagcacagttaattaacattattactaatcgtagattatatgatcagattttaagcgaaactgatacagataaaatgtataaactaataaaaaaatcagttcagtgagatagaaagtggttcaatcatgttagaagatttaaaaaaagaagtttatgaagccaatatgcaattgcctaagttaggactagtaacctttacttggggcaacgtatctggaattgatcgtgaaaagggcctatttgtcattaagccatcaggagtaccatatgaagaattaagcgctgatgatatggtagttgttaatttgaagggtgaagtagtggaagaaacaagaaatccatcttcagatacctcaacacatacgtatttgtataatcatttccctaaaattggtggtattgttcatacccattcaccttgggctgtatcttttgccgcagctaaaatggatattccagcaatgaacacaacccatgcagataccttctatactgatataccagctgcagatgctttaactaaggaacaaattgaagaagattatgaaggcaatacaggtgttacaatcgtaaagactttcgaagagcgtcatttagattatgaagcaactccaggaaccttagtatctcaacacggaccatttacatggggagaaacaccagctaaggcagtatataatgcaaaagtgttagaagtagtggcagaagaagacttccatacattagaattaacgcatggaaatagtcatttaccacaatacttacttgataagcactattatcgtaagcatggtgaaaatgcatattatggtcaaaacaatgctcattcacaagacgagaccgtaaaatagttttatagttgaatataatagagtatagtttttcacaaacaaaccatgatctatacatttatctacaaggctgcttacttttgtatttatatccatcgatatggaaataatattcccaattaaatatgagcagcgcaaaaagtaaaacaacaatataaaaatcaaccagataaaaattagccaaagctttaaattatcgagatggcttataaataaatctttgatatcatcttctagtgaatttacaacaaaaactataaatatgtattttgataatttaaatgtttttcttacagcttctttatttttatttaattgattagaggcatttttatacactgaggggtatttatcaaaattagaaattaaagccatttctttaaaaaatggatctttggcaaaaaaacttttgtttttatgtttatgccataaaattagacctggaattacaaaaattaaagatatataaaaaatttaatcactaatcggtattgaagtttggccaaactcaataaaaaatggaaagccaaatataacaatgtagataaaaataaattgaatagtattcaattttaaatcaagatcttctttatattttttgtaggcactagagtgaatattagttacttttgtacattgctcgtatatgttgttatgtttagagtaaaacaatttaaccagtctccttaaaaaattaattataatattatgttaattcaatcatatgttggaaaacaagacggtaatattagcatgcagtgcatggaaaatattgaataaataaaatgactcaagaaatcaaactttcttgagtcatttttactatctatctttctaaatcattattaaatgaagaattaatagctttattagaataaaaattttttattctttttgttttaagatctaaaggattttctttttcttctttagtcaatggtaagtgtaaattaacttctttctctgaaggaagagtggtcatgattttatctaaagctttttcctcatcaacatcagtttcggcaacataaaaacgcattaaattaaccataaattcagcatgatcaatattgttaaaaggtaaaactaaataattctgtttatcccaggtattcatagcagcgttagcagcaattaatgctgttctcttgtttccatcctggaaaggttgtaatttagagatttttgcaaaaactttccaaccgtcacgtctagtttttttagatttattaaattcgataacaatgttatcgagatctttctttttgacaacatcaggagccgaataagcacctctagatgtaccattaggatccgtaactatcattattgcatcatctggattatagaaagcgtttcttagatgtcctggtagttgaggatcctcattttcagaataagtaaaagctttatttaccgctattattccatcgctattaaagcccttatcttcaattgctgaaataccatctagtgcatcatataaaatagctgtatcattttttggtaattttgctcctacttcattatctagaacccgtttagtttgaaggacagaacttttatagttgttcatacttccaaatgaagtaataaatcgtgctaaagccagatttttattgttgttattcatattaattttcctttcatttaaatgttttctcttttttttattctgtaaacttgttgacgcgatattcctactttttttgcaattgaagcaatgggaacattttctttttttagatcctctactacagtttgccaaacccaccggtttctaggatctttagcatttttaccatatttaatttttctccccgtatatacatgagcggccttagcaatctttataccttgagcttgccgttctctaattttctctcgttcattttgtgcaacaaatcccattagttgaatcatcatatccatcatgaattgatctacaagtgggttaccagtattggtttggggtaaatcatctactataagtgttacgccaatatctcttaaacgttgaattaattttttaatatcgttatagtctcgactaagtcgatctaaacttattacctgaagaatatcatcttctcggagataattcatcatttctttaaaagcaggccggttaaaattttttccactatacttttccgaaaaaattttatccgcgtgaacttcttttgctcgagcaagttgtcgatctaaattttgttcttctgaactaacacgtgcataaaaaactaatgacattttcgtatttttccttttaattttgttacattattatgttacactatttttcctgatttttcagtagtttaataatgtaacaataggggataccctaatgttacactaaacagatatatttaatacaacatcttctaatttatgataaaataagacgtaagaggtaagacgtaaatagtaacaagtgaaaaggagaataccatggataatccatatactggaaaaatatcccaaaagggtcagttagtaattcctgcagcaattagaaaggctttaggtttagataaaggggctaaagtctcttttgaagtaaaaaataatgaagtaattgtaaaaaagcttccgacagccttagattggtcaaatttaattgctgaattacctgaagaaaaggttgagattgataaaaacggtcagtatgatcccaaaaaatctcctaattttcatgactggatggttaatggctaatgaaaccgatggagatttacattgcagacgtaccatttgatgataaagatgattcaaaaatacgtccggctttagtggttaaagtcagtaacgaacgtgtaaatatatttaaagtaacaacaaaatttaaaaataaatctaaaaagataaggcgactatattatccaataaaaaaatggaaagagtccggcttgaaagaattatcctatgtagatacacatagaacatataacatatcacagaaagcggtattcagtagaaaaccaatcggtaagttagatagtggagatattattgggttatttgagtttattcaaaaaaataaaaaaggaaagaaaaaatgtatgatcaagaccaaatagtagaaaactatagcagattacataatgatttcaaatttcaaaaaccaatgtcaattttgatattgacagcagcagtgcttaataacaatcaaaactctactattattgagcatgctataaattcaattcgaaaagattttgcgtattataatttgcccatcattatcatcttcatcatcattactagttaaattttctggtttcagttgggttactccttctgtttgaagcccagccattataaggccagaaaatagaaagagtctatcgttagtaataagagagtttttaagaatagagttatcataaattttctgatgtatattcttaacagccttttctagcctatcttcagtcttattagttaaatactctaactccttatcagataaagttaatctatccaatattttagctaaatcatttacattattggatttcatcaaatcccatgatttatctaattcaacaatgtgcttaggctgaagcttattttttctagaaagatagtatgccttttgttcaggatcttctacatgatttttattatccagtcttgagccattaattcctataaaaataacttcattgtatccactcaacggatctcttaaaattgtttgagcataatgatatgcaccatttgttgcatattcttgtatagcctttgcgttaggatctccttttttatgcggattttttgcatttactttagaatcagatgcccaaggcactatttgtataatttcaccatctttgtttagtttttcaagtttattttttgatcctttagcctcaatcatcactgggatatgacgattaactttaggaatattgagcattaacataatatctgggaaatttttacccttaccaccagattttgatggtgcatctgctaacgcttttgcaatagatggactaattaaatcagcttgcgttttaccataatgcgtaatccccaatttatcaagataatttttataatactcttcgactttttcttcgatagatttaaccacttatgccaccgcctttcgatactcgacggcagcaaaaaagagcgtactcaaaataagcacgctctttaaggcggtgtaatataatctagctaatgtacttttattctttaaattgactatcattattttacctttaaattaaattgttttatctaactttaccacactagcaaaattttttaacatcaaactctaaagatgaatacaaaaattaactactccataggtatgataaaatacgataagcgactatgttcctccaattattgtgggtatatgccttaagctattcgagcgatggctagatgctcgagacaaaaggaaaaaagaaaatagtcgcaaaaaatagccctcacattcaaaagttgctcgaatgtaaaagaaaaggattgctggtcagagcaatcctttttgagttgttttggttattaaaccatcatatctttgttgcaaccatagtataacatgagaaaacaaaaaatgacaaattattatctcaaaagagacacagattgtgcctctaatttgagatatactcaatgatcaccataagtaaggcgacattgtaattacaataagaattatttcaaatcaaagcccaatttcattttattccaataacgtttttctacttcactaacataatttctcatatactctaaatcaagagtttcattatctttaacgggtaaggtaaatttagcactgtaaaatataccatcaacatttcttatggcttgtggatcaaattttaatgctaatctttgtaaccatggtaacaggtaaagacctactttttcgtctaattcaaacttaggttgaataacttttataaactgaccactgtaccacgaatcattttgataattgacattcatttgcattaaccctaagctaaatgttttttctggattaagatgttcatcatctataaatccagtatatccatcaatgccattgttatttcgagttcttgttacataaggataggtacagggaccatctttatttagtgagattttatccaaatgtggagctgaatagattaaaaatagatcactagatgaaaattctttaaacctttgcatattataccccctggtccaagattctatttaacttaaacttcatataattttttattgttatttcccaatccttcttttcaggcgttgtatttaccttataatgattttcaaaattccaatctgtacctgaatcatctataacatcttcaacatattgtttctttaaatcccataattcattatgaaattttgaattgttaccagcagttttgcctgatttcaagagtaataagagatcctggtatctatgagcaggcttactaatttctttaataccacgttttgttcttttataaccatcatttctaaaatctatgaactttacacttctatcaaaatcatgaggaactccaacttcaaatatataaatagaggtgtttacaatagcattaggtacaaataagtcatatggcatctttatagaagctaataaagtattatttttcaaaatttcttgattagttattctcgattttccacttccagcactatcttgaataattatcgcagctttagcatgttctttattagacataaatcttaatccatgtgctaaaaatggcataccatagttatctgcactaaatgggggatttaataataatttattagcattaaaatcagtatataatttagtcggttctttaaatgtatcacctttttttatttggctagaaccatcacctcgtaaaatcatatttgaagcagctaacgtatacatttttgcatcatattcaacacccaagagctgagacttctttatttgtcgaatctttttattagctagttcagaattaattccatatgtatcattagcatcatcaatcatcaatttcatactagaaactaaaaatgctcctgatcctgttgctaaatccattactctatcattcatgcttacattaattgccttagccattaaatcagttatgtatggtggagttaatactttgcctaaactccctccatcacccaaagcatattttaaaaattccgaatacattgaccccataatatctaaagatccactgtcagcatcaatttgtaaaaagatttctttatataaaaagataaatatttgtttggttatgcttgctctttcagcctgtatcatttttccaacaattttatctttatcaattagcttatctctatccagatctgaatgaatcgctccttcaaaagaatccatcatcattttttgcttatctttagtaatatttcctcgtttatctaaaaaatcatttaattgattaatgatttttatagaatcgctttgcttttcactctgaataccatgtaaatcatctggtgttaatccatctgcaatacattctcctgttttaacatctgtaactttttgcattgctaaaagcataccagaaacataaacaacacgctgttcagtagatatatttaaattattcatcaacttatttaataattttgcctttttttgaagatgttgctgagacttaactaatacctgatgtttttctgtttcggttaattgagcatcatttaaaaattgctgaaacgcctctttagtcgctaaaaaatgtagattatcatacttaggcatacgttttggctcaccattaactgcatatacataatatacctgttgaactacatgattagggttatcaccagcaactccaactatgacacaatctttatacatatgcgatctaagtatagttcgtgcataatgaagtgcaccattaacagcataattttttatagctgcctgagaagtagcaattttatctttagaatctaacttaattaaatattttgaatgaagcttattttcaaaaagaacaggaacagaatacttagtaatattaaaatctggctcaccaaaattggtcttgtttacggtttttgcaccaccttttaatgcttcttttaagtagtcatccatatatgactcaaaaccatactcttgcttagttaagccaatatctttttccaattcatcctttatataatcatcaacttgtctttctagcttgtagtccaagatatcaaccacttatgccaccgcctttcgatactcgacgacagcaaaaaagagcgtactcaaaataagcacgctctttaaggcggtgtaatgtaatctagctaatgtacttttagactttaataccctgatactgctataaggagaggctgtaccccccccattttgagaataaaatgctgtgttatctattttctttaaattgactatcattattttacctttaaattaaattgttttatcaagcctcaacacaccagtccttgtgattggctttattttcctattcttttaaaaaatattttgtacttgcatcaatagtttatcaaatttagatgatggattcacatttccaattaccttaccatatctaggatctttttcaataaaaaacaaaagcaagctattattaaaaagatatatattcacttaattgtgaataacttctgaacttatccacaagtccaaaaggacataaacgtcgatgtaacagcaaaattggttaattaatattttgtaatgatgaatgcgcctgaaaagcgtataataaaaatagactaatttagagaggaggatgcctatggtacaatatgtagctttagatcttgtcaaaagattgaagagattgggctttgtagaagttaatattgcaggtgatcatcatatttataaaaatatggtgaacggaaaaagagtatcaattccttatagtaaaagaaaagacactcttccaattggtacagcccatcaaatattgcgcattataaaggaatgcgaaaaagaatagttctactagttatatagagaggaacaactttgtacctctctatttatttgcattataatttattatttaataaaaagatagtaaaaaatccaaattttcaaattttaaatataattccatttgacattatacgcattaatacgtataatagtacgtgaagcaaagttaactttgcttcacgtactaggaggtatataagctatggtttttgttgtgtatccagctattctagatgatagtgaaaacgaaaaagaatattatactgttactttccctgatgtgacaggcgctatcactgatggaaatggagaaggcgaagcaatggctagaggttcagaaattttaggagcatttttatatgatcttcctaaagaccagttacctgttccaacagacattgaagttgttagaagaaataatccagataaactggtcgttcctatttttgctgacttagaaaaagcaagacgagaaactaaaccagcaactgttaaaaaaaatacgacgatacctggtgatttggcttataaagctgaagaagctggaattaatttttctcaaactttaacagaagcattaaaaaagaaattaaatttataaaaaagtcactttttaacatgttatataatatagctacatcagaattttagttttaatgtagttcacattacacaaaagtggacaattggtttaaaaaatcatataattataaaagaaaaggagttagtgactgctactcactaactccaatcgtaacttaagatgactgttttgttaggctaatccttgtgattagctttttttattattgcgtaagcaatagctacacgaataataaaaatacctagcgcgcctaagaaaatacttagtgctacggctactgctatcacttggtagtctaactctccagtctacccaattttgcataagcttccacctccgtaactttaattgtttgaggggtgtgtagccatgctaaagttactaagttctaacaggagctacctgttgttttgaacctaatattattctactaaaatctactcatgcttaaaaccgtaaatatgcataaaaggagattgcttcgtaaagcaatctcctttttagttgatccatatcgtcgaattaaaacaactattgcgcaataaagttaaccaaatagcatcttttccataacataaccaacaatcaaagacaaaattatgaaaatactcaacaaacaaaaaattataaagtccgtattcattttcttcatttcttaactatttaaatatttattgattttctaagatctacaaatatattctttaaattccgattattcattttgcgttttttttttgagaatatcttctaaaattaacaccttcatttgtttagttttaattttatcaataaagaaaacaattcccaaaatcagtataaatataaacgctattataattagaccctcaattagtaaaacgtttttcatttcatcagtagttaacatattaagggcttcagcaggttgcacctttggcaatgtattaactatcaataattcacgcagccaatttatgattgcttggccaagtccaccaagtaaagctgtaaacatagcaagcataatacctgtaaataaaagtttagaatgctgaacctgagacttataacttattaatatatcttgtaatttagcaataccaattgctttatatctttctctaatcaatctaacttccttaacagatcgttcttcgctactttgaaatatatatttaatagtccttataatagtgatttttaaactattccatatttggttcatcattataactgtccttcttactcaacttgtttctaatcctaacgaagtacgatactttttcatcaactcggcattaggatactttgtaggatataccttccaaggagctatattattaaccctcattccaaaataatcactatattcagcatgttgcattactcttacttgccgaccaataagccaatcgtttaaaccatttataccgttaatttctacgccttctggaagaccacacgcataacatatatattgaaaattactaatattaaaggtacgcgatgcctttctttgccaatattctagctttagcctatatccagcatagactttattagtattctttagttcagtagcagaaatatcgtctctaatttgtagaataactgtaactttggaagttaccttatacttttctacagtggtcgctactactatgcactcgtaaataccatcattaaatacttcttccatactcacttaaccttaattcctgaataatttgttataaagaaaaactcgcctaatgcctccatttgtttatctacttcttctatatcaaaaactcgttcaccacactcaggacaaatcacacatctttttccaatgactgcttggcaatattgacattctttataaggactaggcaccagtcctccacctttaggtttaggtctatcttttaatgaccactttctaggagtatccggtaatccaaatagcttataattgcccactaagtcaataatctttgcaaccttatttggtttatatctcatacaacgcatagattgctgcacatcaatgcccaaagaagcagtaggtcttagtaaaatcacacaggagcaatctggaacgtcaaatccttccgaaatcagatcaacgttgcttaaaattttgatctttccctcacgaaagtcagtcatgattctatctcgctctttagcaggagtagtactatcgcagtgctccgcattaattccattatcctgaaatctcttaactactttttggctataatctacatcatgagcataaagaatagtttgttcaccattagcaaattttttgtaggactctacaacatcacccaaaatctggtgtcgattaacttcttgagttatcgatttagctgtatagtctcccgtactagcttttgacaggtcatctgtatcaattaatctctctgaataatacttaaatggagctaaatgtttatttctaattaaccaacttacagaaggtcctataattaaatcttcatagatatcttcaaagccttttcctgacaatctccatggtgtggcagtaaagcctactcttaaggcatatggaaaatagtgataaattttctgatacgttttggctctactatgatgagtttcatcggttaatattaaatctggcttccatgtattatcaggatcaagcaaacgattctttgctttcactactgtagtacaaatgcagtgatccatattcacttcttgttgactaaattcatcttgaatttgttcgacgatttcttgtctatgaacgataaataagacatttctattctgagcagtcattcttctagctaattctgccatgataattgatttaccagaaccagcaggactttgaactaaaatcgctctcttgccttctttaaatttattaaaaacatcactaactattttttcttgataatcataaagcttaaacatctactcccttctttcgtcgagcaaccaataatctagttgccatttcttttcgttgctctaatgtaaaatgtggtcgtttatgtacattaattgaataatttttcacatctaaccatccgtccaaaaatgtagtttttcctttactgtttcttccaactcgataatctttattcttgtctaacttgccgataaatttacgaacgtctttatcgatatcagttgtaatacggtaattatgcgttaacttatcataaagaataatagtttcttgctctgcatagctaggcgcttcatatttaataatcgtcttcattactctttctccttaattttcctcattctctataaaatgtatcgcctttaggatcagatataacaggtataagaattgcctctcctgtctctcccttgtgtttttcttttgatatcgagctttcaatgatagaacacagttcaaacgtatttttattccaacgataaaaaagaagatcaactaaatgatcaacattaatgcgccgatctacatcaacagcccgaaacacgagatcaacacacatttttgaatttgatattccagttgtaacaagaatatttaaacctagcttgttagtacttaaatctgctaatttagataattcttttaaagaaggtgagaaaatatttttaaaaacaagttgccaagaatactcattatgttcaatagatattattaattcttttttatctattacaaaatcaaaatcaaaatcttcatatagatatcttcttaactcatcttcattaaaatcatcttcaaaatcagaatgagccatatagtactttctagaatctaatcgtgctaattgcaaatcaatatcagataattttttaaaaatgattaacttaccacttgaatctataattcccttttgagttgctaatttgctcgttcggtagcgtgcatacgtagagctaagtacgcctaaacggatcatttcatataaatgatttttttgaacatttttcctctttataatcttattcattttaattatttctttctatttgccatttttatcgtatttaaaaacttcgtccttgagtaactttctatcaagctcaaatctagaagatttattaatataattagatactagttctgtaaatatcagcaaaattatccatctataaatcttagtattatagggtggcattaaaaatatggtacatcctattcgagatattaatatcatggtttgtacagaaagtcttaagcctattatcagtgtctccattacaccaagaataaagcgatcaaattttttcatatttttctcctacttagttgaaaaacctggtctttgctcatttaaaaccagtactttttcacggaatctattcttttctgtaggccgatacttttcttttaaattaatatcgtaaaaagttagtgtatctttattatttttactaattgacttaattttcttaattggaacgtcttttacaaccttgccattattcagcaatacttgtgcttttcctttatctatcggaagatatgattttacttgatacgatttaacagatacatattctgtgttaacatagcctgctcgttccgagctatcaattgccttttctgcttgattttcgtaatcaaaagtagttgctaaaaggctaaagtataaaacagccgatataaccaaacttacaaacataatagatccagcttcgctctcatctagacctttatcatttaacttaattagtaggtaagcaattatgcatgcaagcacaaatgctgatactataaaaaaagtacgtgattataaacaaatttatctatttcttttccaaattccatatttttcaatgatccattcacttaatccaaatcaactttaggtgcgttataagcttgagagttagcttggtagtagttcataacatgcatattcttactttgagctactacagagctagggaagttacgaactaatttgttataatcttttacccgttgaatatagttgcgtctttcaacagaaatacgattttcggatccttctagttcaaccattaaatcgtgaactcttgaatctgaattgagttttggatatttctcatgaattacattaattaaggcaccaacactagtatttaattgagcatcagccttcaatttttcattatttgtttttgcaccattgtaatttgctctagctttagctaattctgaaaataccttttgctcttggtgcatatcacctttaactgaggctgttagattaggaataaggtcatatctacgttgcattacattttcaacctgtgaccattgtgattcacactcttgttgtgcatcatttaaagaatttccaacactaatccaggttgttacacctataaaagcaataattccaataactaagcctaaatatttcttcatttttaaattctccagtctatctactattttattttgcttgtattgataatattcaattaaatcgtcactatatttttcattttcgaaatattcacccaattacttttccaaatcaacttgtgcattatttggcacgaccgtcacgactccatcatggcgaacttccaatcgcccaccagtagaatcatcgccgccattattatacggatagacctttgcattataataagtagtcttcttgttattatctttaataaccgtcactttagaaaattcaccagtatccgcactatttgtcgttgtcgaaaacgacatccatccttgatttaaggtacaaccagaaagtaataaaggcgttaccaataagactaatcccaacgcaccttgtttaacatactgtttcattacgattctcctttcacgcttgcaaaatgttttttaacttctttacacgtatttttgtcaattaaaatattaatttctaacaacatatttaaaagcaataatcgaaaaaaatatgagccaaaaaatagctatgcaaatagccatcatatcagatagttcagcaaaagttacatccgctttatccgacttacttttagaatctttattagattgagtgggtaacttatcagtaattctatgaactattaaattaactagttccttagttccttgagaatacgttttatggtgtactagctcttctccagccacattgacagttgctgaagcaccaccgccaccgctttgaccattacctttgtttataattcgacttttcgtttctttagtaaaagcctttacaatagttttatttaaataagcatcgggtaatatactttccataccataaccggtctgtactcttacctgataatcctctttattaattacgattaacacgccattatttaacttacctttgccaaaatgatacttatcaaacatcttttgagagtaatccgctatatcttctccatgacaatcttttgaagttattactgcgataataggtttaccttttactgtgcttaacaagttatcgttcacatcatttatatattcctgtgtatcatcattaatgattccagctttatctaatacataagatgtctcttgactaaaaaaaagactaaatggatcagaattatcgtcatcggaatcatcaaatcgaagaaaactattatcattgctatctgtatcatcagcaaagcattgattattaaaagcagctaagagtactaatggagttaaaaaagttaatacaattaagctaaattttctttttatgctcatctttttcctctgatttttctactaattcatcgagtttgaattgatcttttgtatattcatcgatcaaccagtcgtttaattttttgaaagtgattgaattaacgttgcggtgatggtgcttgaaaatgtctattagcgtccatttgttaactccagttatttcagctaaagcgttcattgttaaatcaagctctccacgtttgcgcttgattgctaatacttgtttttctgttaattgcatatctagaactcccttttatatttattaaaaaatttatttaaatagttttatatagtacagtaatccgtcttcttttacattcagatggctatgaaacaagcgccaacgatgattgctactattcaaaccattacaaggtctaaaaaatctaaaattttattcttatttttcattatctttcaattctcctagtactatataagcaggtactttttcaactacctcatactccatatttttctttagcaaattgactaattcttccgctgatggagcttcagtagacgcaaaagtactttcatttccaatacagtcatgaataatatcaacagtgtaattatgagcagcattgtttgctatcctgtataaatcaaattctttatcttctctttgatatttacacattagaatatcgtcataattatattttggagcgttattgacttttgagaatacttcaccaatatcagcattacc
